(19) United States
(12) Patent Application Publication
(10) Pub. No.: US 2026/0103695 A1
(43) Pub. Date: Apr. 16, 2026

(54) Optimized SPCAS9 Proteins for Efficient Genome Editing in Eukaryotic Cells

(71) Applicant: Integrated DNA Technologies, Inc., Coralville, IA (US)

(72) Inventors: Christopher Anthony VAKULSKAS, North Liberty, IA (US); Michael Allen COLLINGWOOD, Coralville, IA (US)

(73) Assignee: Integrated DNA Technologies, Inc., Coralville, IA (US)

(21) Appl. No.: 19/046,594

(22) Filed: Feb. 6, 2025

Related U.S. Application Data
(60) Provisional application No. 63/550,226, filed on Feb. 6, 2024.

(51) Int. Cl. C12N 9/22; C12N 15/11

(52) U.S. Cl. CPC C12N 9/226; C12N 15/111; C07K 2319/09; C12N 2310/20

(57) ABSTRACT

This invention pertains to Cas9-NLS fusion proteins and nucleic acids encoding Cas9-NLS fusion proteins for use in CRISPR/Cas endonuclease systems, and their methods of use.

[0001] This application claims benefit of U.S. Ser. No. 63/550,226 filed Feb. 6, 2024, the entirety of which is incorporated herein by reference.

### SEQUENCE LISTING

[0002] The instant application contains a Sequence Listing that has been submitted in XML format via Patent Center and is hereby incorporated by reference in its entirety. The XML copy, created on Feb. 5, 2025, is named 6391-0021WO01, and is 722,628 bytes in size.

### FIELD OF THE INVENTION

[0003] This invention pertains to Cas9 mutant genes, polypeptides encoded by the same and their use in compositions of CRISPR-Cas systems.

### BACKGROUND OF THE INVENTION

[0004] The use of clustered regularly interspaced short palindromic repeats (CRISPR) and associated Cas proteins (CRISPR-Cas system) for site-specific DNA cleavage has shown great potential for a number of biological applications. CRISPR is used for genome editing; the genome-scale-specific targeting of transcriptional repressors (CRISPRi) and activators (CRISPRa) to endogenous genes; and other applications of RNA-directed DNA targeting with Cas enzymes.

[0005] CRISPR-Cas systems are native to bacteria and Archaea and provide adaptive immunity against viruses and plasmids. Three classes of CRISPR-Cas systems could potentially be adapted for research and therapeutic reagents. Type-II CRISPR systems have a desirable characteristic in utilizing a single CRISPR associated (Cas) nuclease (specifically Cas9) in a complex with the appropriate guide RNAs (gRNAs). In bacteria or Archaea, Cas9 guide RNAs comprise 2 separate RNA species. A target-specific CRISPR-activating RNA (crRNA) directs the Cas9/gRNA complex to bind and target a specific DNA sequence. The crRNA has 2 functional domains, a 5′-domain that is target specific and a 3′-domain that directs binding of the crRNA to the transactivating crRNA (tracrRNA). The tracrRNA is a longer, universal RNA that binds the crRNA and mediates binding of the gRNA complex to Cas9. Binding of the tracrRNA induces an alteration of Cas9 structure, shifting from an inactive to an active conformation. The gRNA function can also be provided as an artificial single guide RNA (sgRNA), where the crRNA and tracrRNA are fused into a single species (see Jinek, M., et al., Science 337 p816-21, 2012). The sgRNA format permits transcription of a functional gRNA from a single transcription unit that can be provided by a double-stranded DNA (dsDNA) cassette containing a transcription promoter and the sgRNA sequence. In mammalian systems, these RNAs have been introduced by transfection of DNA cassettes containing RNA Pol III promoters (such as U6 or H1) driving RNA transcription, viral vectors, and single-stranded RNA following in vitro transcription (see Xu, T., et al., Appl Environ Microbiol, 2014. 80 (5): p. 1544-52).

[0006] In the CRISPR-Cas system, using the system present in Streptococcus pyogenes as an example (S.py. or Sp), native crRNAs are about 42 bases long and contain a 5′-region of about 20 bases in length that is complementary to a target sequence (also referred to as a protospacer sequence or protospacer domain of the crRNA) and a 3′ region typically of about 22 bases in length that is complementary to a region of the tracrRNA sequence and mediates binding of the crRNA to the tracrRNA. A crRNA:tracrRNA complex comprises a functional gRNA capable of directing Cas9 cleavage of a complementary target DNA. The native tracrRNAs are about 85-90 bases long and have a 5′-region containing the region complementary to the crRNA. The remaining 3′ region of the tracrRNA includes secondary structure motifs (herein referred to as the “tracrRNA 3′-tail”) that mediate binding of the crRNA:tracrRNA complex to Cas9.

[0007] Jinek et al. extensively investigated the physical domains of the crRNA and tracrRNA that are required for proper functioning of the CRISPR-Cas system (Science, 2012. 337 (6096): p. 816-21). They devised a truncated crRNA:tracrRNA fragment that could still function in CRISPR-Cas wherein the crRNA was the wild type 42 nucleotides and the tracrRNA was truncated to 75 nucleotides. They also developed an embodiment wherein the crRNA and tracrRNA are attached with a linker loop, forming a single guide RNA (sgRNA), which varies between 99-123 nucleotides in different embodiments.

[0008] At least three groups have elucidated the crystal structure of Streptococcus pyogenes Cas9 (SpCas9). In Jinek, M., et al., the structure did not show the nuclease in complex with either a guide RNA or target DNA. They carried out molecular modeling experiments to reveal predictive interactions between the protein in complex with RNA and DNA (Science, 2014. 343, p. 1215, DOI: 10.1126/science/1247997).

[0009] In Nishimasu, H., et al., the crystal structure of Sp Cas9 is shown in complex with sgRNA and its target DNA at 2.5 angstrom resolution (Cell, 2014. 156 (5): p. 935-49, incorporated herein in its entirety). The crystal structure identified two lobes to the Cas9 enzyme: a recognition lobe (REC) and a nuclease lobe (NUC). The sgRNA:target DNA heteroduplex (negatively charged) sits in the positively charged groove between the two lobes. The REC lobe, which shows no structural similarity with known proteins and therefore likely a Cas9-specific functional domain, interacts with the portions of the crRNA and tracrRNA that are complementary to each other.

[0010] Another group, Briner et al. (Mol Cell, 2014. 56 (2): p. 333-9, incorporated herein in its entirety), identified and characterized the six conserved modules within native crRNA:tracrRNA duplexes and sgRNA. Anders et al. (Nature, 2014, 513 (7519) p. 569-73) elucidated the structural basis for DNA sequence recognition of protospacer associate motif (PAM) sequences by Cas9 in association with an sgRNA guide.

[0011] The CRISPR-Cas endonuclease system is utilized in genomic engineering as follows: the gRNA complex (either a crRNA:tracrRNA complex or an sgRNA) binds to Cas9, inducing a conformational change that activates Cas9 and opens the DNA binding cleft, the protospacer domain of the crRNA (or sgRNA) aligns with the complementary target DNA and Cas9 binds the PAM sequence, initiating unwinding of the target DNA followed by annealing of the protospacer domain to the target, after which cleavage of the target DNA occurs. The Cas9 contains two domains, homologous to endonucleases HNH and RuvC respectively, wherein the HNH domain cleaves the DNA strand complementary to the crRNA and the RuvC-like domain cleaves the non-complementary strand. This results in a double-stranded break in the genomic DNA. When repaired by non-homologous end joining (NHEJ) the break is typically repaired in an imprecise fashion, resulting in the DNA sequence being shifted by 1 or more bases, leading to disruption of the natural DNA sequence and, in many cases, leading to a frameshift mutation if the event occurs in a coding exon of a protein-encoding gene. The break may also be repaired by homology directed recombination (HDR), which permits insertion of new genetic material based upon exogenous DNA introduced into the cell with the Cas9/gRNA complex, which is introduced into the cut site created by Cas9 cleavage.

[0012] Certain improvements in the utility of Cas9 has been achieved by enhancing its delivery into the eukaryotic nucleus through the use of improved nuclear localization signals (NLS; Kalderon, D., Roberts, B. L., Richardson, W. D. & Smith, A. E. A short amino acid sequence able to specify nuclear location. Cell 39, 499-509 (1984).) Currently, the canonical SV40 NLS is commonly added to the amino- or carboxy-terminus to facilitate active transport of proteins into the eukaryotic nucleus. The SV40 NLS is viral in origin and demonstrates strong activity in a wide variety of different eukaryotic species including both plants and animals. Though the SV40 NLS has been used with wide success, other variants or mutants with higher intrinsic localization activity have been described. Typically, the context and linkage of an NLS with respect to the target fusion protein is also important and can determine the overall improvement in nuclear localization: there appears to be no “one size fits all” NLS solution for all proteins.

[0013] The prior art consists of using the native Cas9 enzyme absent optimized nuclear localization tags, of which only a small fraction of material can spontaneously enter the nuclear envelope resulting in poor editing efficiency. Thus, there is a long-felt need to provide Cas9 fusion proteins linked to improved NLS motifs that further enhance the nuclear localization of the CRISPR/Cas9 ribonucleoprotein complex, thereby improving CRISPR/Cas9 editing activity.

### BRIEF SUMMARY OF THE INVENTION

[0014] This invention pertains to Cas9-NLS fusion proteins and nucleic acids that encode the same for use in CRISPR systems, and their methods of use.

[0015] In a first aspect, an amino acid sequence including a nuclear localization signal (NLS) is provided. The amino acid sequence of the NLS includes a member selected from the group consisting of SEQ ID NO: 4, 11, 12, 13, 14, 15, 16, 17, 18, 19, 23, 26, 31, 33, 34, 38, 39, 40, 41, 42, 43, 44, 46, 47, 48, 49, 50, 51, 52, 55, 57, 58, 59, 60, 62, 63, 65, 66, 67, 69, 70, 71, 72, 74, 75, 77, 78, and 79.

[0016] In a second aspect, a fusion protein including a first amino acid sequence and a second amino acid sequence is provided. The second amino acid sequence includes a nuclear localization signal (NLS), wherein the NLS includes a member selected from the group consisting of SEQ ID NO: 4, 11, 12, 13, 14, 15, 16, 17, 18, 19, 23, 26, 31, 33, 34, 38, 39, 40, 41, 42, 43, 44, 46, 47, 48, 49, 50, 51, 52, 55, 57, 58, 59, 60, 62, 63, 65, 66, 67, 69, 70, 71, 72, 74, 75, 77, 78, and 79.

[0017] In a third aspect, an isolated Cas9-NLS fusion protein is provided. The Cas9-NLS fusion protein includes a Cas9 amino acid sequence and a nuclear localization signal sequence (NLS). The isolated Cas9-NLS fusion protein is active in a CRISPR/Cas endonuclease system, wherein the isolated Cas9-NLS fusion protein comprises a member selected from the group consisting of SEQ ID NO:162-239.

[0018] In a fourth aspect, a nucleic acid sequence encoding a nuclear localization signal (NLS) is provided. The nucleic acid sequence encoding the NLS includes a member selected from the group consisting of SEQ ID NO: 83, 90, 91, 92, 93, 94, 95, 96, 97, 98, 102, 105, 110, 113, 117, 118, 119, 120, 121, 122, 123, 125, 126, 127, 128, 129, 130, 131, 134, 136, 137, 138, 139, 141, 142, 144, 145, 146, 148, 149, 150, 151, 153, 154, 156, 157, and 158.

[0019] In a fifth aspect, an isolated nucleic acid sequence encoding the isolated Cas9-NLS fusion protein is provided.

[0020] In a sixth aspect, an isolated ribonucleoprotein complex is provided. The isolated ribonucleoprotein complex includes a Cas9-NLS fusion protein and a gRNA.

[0021] In a seventh aspect, a CRISPR/Cas endonuclease system is provided. The CRISPR/Cas endonuclease system includes an isolated Cas9-NLS fusion protein. The isolated Cas9-NLS fusion protein includes a member selected from the group consisting of SEQ ID NO: 162-239.

[0022] In an eighth aspect, a method of performing gene editing in a eukaryotic cell is provided. The method includes a step of contacting a candidate editing target site locus with an active CRISPR/Cas endonuclease system having a Cas9-NLS fusion protein. The Cas9-NLS fusion protein includes a member selected from the group consisting of SEQ ID NO: 162-239.

[0023] In a ninth aspect, a kit for performing gene editing in a eukaryotic cell is provided. The kit includes a Cas9-NLS fusion protein, optionally, a nucleic acid encoding a Cas9-NLS fusion protein, and, optionally, a gRNA. The Cas9-NLS fusion protein includes a member selected from the group consisting of SEQ ID NO: 162-239. Where included in the kit, the nucleic acid encoding a Cas9-NLS fusion protein includes a member selected from the group consisting of SEQ ID NO: 241-318.

### BRIEF DESCRIPTION OF THE DRAWINGS

[0024] FIG. 1A depicts genome editing activity of representative Cas9-NLS fusion proteins of the present invention that were separately delivered by plasmid into HEK293 cells as compared to the genome editing activity of a prior art Cas9-NLS fusion protein (SV40 NLS motif; SEQ ID NO:1) delivered in a similar manner; see Table 2 for a complete description of the SEQ ID NO for the Cas9-NLS fusion protein amino acid sequences and NLS amino acid sequences.

[0025] FIG. 1B depicts genome editing activity of representative Cas9-NLS fusion proteins of the present invention that were separately delivered by plasmid into HEK293 cells as compared to the genome editing activity of a prior art Cas9-NLS fusion protein (SV40 NLS motif; SEQ ID NO:1) delivered in a similar manner; see Table 2 for a complete description of the SEQ ID NO for the Cas9-NLS fusion protein amino acid sequences and NLS amino acid sequences.

[0026] FIG. 1C depicts genome editing activity of representative Cas9-NLS fusion proteins of the present invention that were separately delivered by plasmid into HEK293 cells as compared to the genome editing activity of a prior art Cas9-NLS fusion protein (SV40 NLS motif; SEQ ID NO:1) delivered in a similar manner; see Table 2 for a complete description of the SEQ ID NO for the Cas9-NLS fusion protein amino acid sequences and NLS amino acid sequences.

[0027] FIG. 2A depicts genome editing activity of purified Cas9-NLS fusion proteins of the present invention delivered as RNP complexes into HEK293 cells compared to the genome editing activity of two prior art Cas9-NLS commercial proteins.

[0028] FIG. 2B depicts genome editing activity of purified Cas9-NLS fusion proteins of the present invention delivered as RNP complexes into K562 cells compared to the genome editing activity of two prior art Cas9-NLS commercial proteins.

### DETAILED DESCRIPTION OF THE INVENTION

[0029] The present invention pertains to a high-throughput plasmid-based screen to identify Cas9-NLS fusion proteins having improvements in nuclear localization in eukaryotic cells, as revealed through increased genome editing. The WT Cas9 sequence was fused to NLS sequences gathered from the published literature, which includes NLS examples from native proteins, entirely synthetic NLS sequences, or NLS sequences that match the known consensus sequences for nuclear transport proteins (i.e., Importin a/B) (Kosugi, S. et al. Six classes of nuclear localization signals specific to different binding grooves of importin alpha. J Biol Chem 284, 478-485 (2009)).

[0030] The term “wild-type Cas9 protein” (“WT-Cas9” or “WT-Cas9 protein”) encompasses a protein having the identical amino acid sequence of the naturally-occurring Streptococcus pyogenes Cas9 (e.g., SEQ ID No.: 159) and that has biochemical and biological activity when combined with a suitable guide RNA (for example sgRNA or dual crRNA:tracrRNA compositions) to form an active CRISPR-Cas endonuclease system.

[0031] The term “wild-type CRISPR/Cas endonuclease system” refers to a CRISPR/Cas endonuclease system that includes wild-type Cas9 protein and a suitable gRNA.

[0032] The phrase “active CRISPR/Cas endonuclease system displays reduced off-target editing activity and maintained on-target editing activity relative to a wild-type CRISPR/Cas endonuclease system” refers to the activity of a CRISPR/Cas endonuclease system that includes a mutant Cas9 protein that displays a reduction in off-targeting editing activity that is typically greater than the reduction in on-target editing activity relative to the corresponding off-target and on-target editing activities of a wild-type CRISPR/Cas endonuclease system that includes wild-type Cas9 protein when both CRISPR/Cas endonuclease systems include the identical gRNA for a given target sequence. Preferred off-target and on-target activities of the CRISPR/Cas endonuclease systems depend upon the gRNA and the target sequence of interest; such preferred off-target and on-target activities of CRISPR/Cas endonuclease systems having mutant Cas9 proteins are illustrated in the Examples.

[0033] The term “Cas9-NLS fusion protein” encompasses protein forms having a WT Cas9 amino acid sequence fused to a nuclear localization sequence motif (NLS), wherein the resultant protein displays biochemical and biological activity when combined with a suitable guide RNA (for example sgRNA or dual crRNA:tracrRNA compositions) to form an active CRISPR-Cas endonuclease system.

[0034] The term “isolated nucleic acid” include DNA, RNA, cDNA, and vectors encoding the same, where the DNA, RNA, cDNA and vectors are free of other biological materials from which they may be derived or associated, such as cellular components. Typically, an isolated nucleic acid will be purified from other biological materials from which they may be derived or associated, such as cellular components.

[0035] The term “isolated wild-type Cas9 nucleic acid” is an isolated nucleic acid that encodes a wild-type Cas9 protein. Examples of an isolated wild-type Cas9 nucleic acid include SEQ ID NO:160.

[0036] The term “isolated Cas9-NLS fusion protein nucleic acid” is an isolated nucleic acid that encodes a Cas9-NLS fusion protein.

[0037] A competent CRISPR-Cas endonuclease system includes a ribonucleoprotein (RNP) complex formed with isolated Cas9 protein or Cas9-NLS fusion protein and an isolated guide RNA selected from one of a dual crRNA:tracrRNA combination or a chimeric single-molecule sgRNA. In some embodiments, isolated length-modified and/or chemically-modified forms of crRNA and tracrRNA are combined with purified Cas9 protein or Cas9-NLS fusion protein, an isolated mRNA encoding Cas9 protein or Cas9-NLS fusion protein, or a gene encoding Cas9 protein or Cas9-NLS fusion protein in an expression vector. In certain assays, isolated crRNA and tracrRNA can be introduced into cell lines that stably express Cas9 protein or Cas9-NLS fusion protein from an endogenous expression cassette encoding the Cas9 gene or Cas9-NLS fusion protein gene. In other assays, a mixture of crRNA and tracrRNA in combination with either Cas9-NLS fusion protein mRNA or Cas9-NLS fusion protein can be introduced into cells.

### Screening and Identification of Novel Cas9-NLS Fusion Proteins Having Surprisingly Robust Genome Editing Activity

[0038] The genome editing phenotype of the SpCas9-NLS fusion proteins described in Table 1 are presented in FIG. 1 and Table 2. Three biological replicates were performed with high consistency, which enabled us to confidently isolate a large collection of novel SpCas9-NLS fusion protein variants with enhanced genome editing activity. We chose the most promising variants from the initial plasmid expression screen and purified these SpCas9-NLS fusion proteins and determined cleavage activity with ribonucleoprotein (RNP) delivery of these variants into human cell lines. The results indicate that our screens have revealed SpCas9-NLS fusions with unexpectedly increased potency over commercially available Cas9-NLS proteins and controls.

TABLE 1
NLS amino acid and nucleotide sequences

| SEQ | | |
|---|---|---|
| ID | | |
| NO.^{a} | AA sequence | DNA sequence |
| 1; 80 | AAPKKKRKV (SV40) | GCGGCCCCCAAGAAAAAGCGGAAGGTGTGA |
| 2; 81 | AAKRKNSATVHLCPVP | GCGGCCAAGAGAAAGAACAGCGCCACCGTGCACCTGTGTCCTGTGCCTAGAA |
| | RKR | AGAGATGA |
| 3; 82 | AAKRPAELDGADNASQ | GCGGCCAAAAGACCCGCCGAACTGGACGGCGCCGATAATGCTTCTCAGGCCG |
| | AAKRR | CCAAGAGAAGATGA |
| 4; 83 | AARKRNSATVHLCPVP | GCGGCCCGGAAGAGAAATAGCGCCACCGTGCACCTGTGTCCTGTGCCTAGAA |
| | RKR | AGAGATGA |
| 5; 84 | AAKRPATLANNSPAAKR | GCGGCCAAGAGGCCTGCCACACTGGCCAACAATTCTCCAGCCGCCAAGCGGA |
| | R | GATGA |
| 6; 85 | AAKRPATLANESPAAKR | GCGGCCAAGAGGCCTGCCACACTGGCCAATGAATCTCCAGCCGCCAAGCGGA |
| | R | GATGA |
| 7; 86 | AARRRNSATVHLCPVP | GCGGCCCGGAGAAGAAATAGCGCCACCGTGCACCTGTGTCCTGTGCCTAGAA |
| | RKR | AGAGATGA |
| 8; 87 | AADTRLGKRKRRPW | GCGGCCGATACCAGACTGGGCAAGAGAAAGAGAAGGCCCTGGTGA |
| 9; 88 | AARRRSVLKRSWSVAF | GCGGCCCGGAGAAGAAGCGTGCTGAAGAGATCTTGGAGCGTGGCCTTCTGA |
| 10; 89 | AAKRPATLANDSPAAKR | GCGGCCAAGAGGCCTGCCACACTGGCCAATGATTCTCCAGCCGCCAAGCGGA |
| | R | GATGA |
| 11; 90 | AAKRPAALAGAGNASQ | GCGGCCAAAAGACCTGCTGCTCTGGCTGGCGCCGGAAATGCTTCTCAGGCCG |
| | AAKRR | CCAAAAGAAGATGA |
| 12; 91 | AAKRPAELDEADNASQ | GCGGCCAAAAGACCCGCCGAGCTGGACGAAGCCGATAATGCTTCTCAGGCCG |
| | AAKRR | CCAAGCGGAGATGA |
| 13; 92 | AARRRKRRREWEDF | GCGGCCCGGAGAAGAAAGCGGCGCAGAGAGTGGGAAGATTTCTGA |
| 14; 93 | AATSPSRKRKWDQV | GCGGCCACAAGCCCTAGCCGGAAGAGAAAGTGGGACCAAGTGTGA |
| 15; 94 | AAAVKRPAATKKAGQA | GCGGCCGCCGTGAAAAGACCTGCCGCCACAAAGAAAGCCGGCCAGGCCAAGA |
| | KKKKLD | AGAAGAAGCTGGACTGA |
| 16; 95 | AAPILGKRKRHLFL | GCGGCCCCTATCCTGGGCAAGAGAAAGCGGCACCTGTTTCTGTGA |
| 17; 96 | AAPAAKRVKLD | GCGGCCCCTGCCGCCAAGAGAGTGAAGCTGGATTGA |
| 18; 97 | AAMSRRRKANPTKLSE | GCGGCCATGAGCAGACGGCGGAAGGCCAATCCTACCAAGCTGAGCGAGAACG |
| | NAKKLAKEVEN | CCAAGAAACTGGCCAAAGAGGTGGAAAACTGA |
| 19; 98 | AATLGKRKRISCVT | GCGGCCACCCTGGGAAAGAGAAAGCGGATCAGCTGCGTGACCTGA |
| 20; 99 | AAKLKIKRPVK | GCGGCCAAGCTGAAGATCAAGCGGCCCGTGAAGTGA |
| 21; 100 | AARVLGKRKREDRP | GCGGCCAGAGTGCTGGGCAAGCGCAAGAGAGAGGACAGACCTTGA |
| 22;101 | AALLGKRKRPSIEH | GCGGCCCTGCTGGGCAAGAGAAAGAGGCCTAGCATCGAGCACTGA |
| 23; 102 | AAPVLGKRKRSLSS | GCGGCCCCTGTGCTGGGCAAGAGAAAGAGAAGCCTGAGCAGCTGA |
| 24; 103 | AAILGKRKRSHHPY | GCGGCCATCCTGGGCAAGCGCAAGAGAAGCCACCATCCTTACTGA |
| 25; 104 | AASMLGKRKRCIIS | GCGGCCAGCATGCTGGGCAAGAGAAAGCGGTGCATCATCAGCTGA |
| 26; 105 | AASVLGKRKRHHLD | GCGGCCTCTGTGCTGGGCAAGAGAAAGAGACACCACCTGGACTGA |
| 27; 106 | AATVHLGKRRLRPW | GCGGCCACAGTGCACCTGGGCAAGAGAAGGCTCAGACCTTGGTGA |
| 28; 107 | AASVLGKRKRHPKV | GCGGCCTCTGTGCTGGGCAAGAGAAAGCGGCACCCTAAGGTTTGA |
| 29; 108 | AASILGKRKNRDPS | GCGGCCAGCATCCTGGGCAAGAGAAAGAACAGGGACCCCAGCTGA |
| 30; 109 | AARVLGKRKTGRSP | GCGGCCAGAGTGCTGGGCAAGAGAAAGACCGGCAGAAGCCCTTGA |
| 31; 110 | AAVLGKRKRDDCW | GCGGCCGTGCTGGGCAAGAGAAAGAGAGATGACTGCTGGTGA |
| 32; 111 | AAKRKCAVFLEGQN | GCGGCCAAGAGAAAGTGCGCCGTGTTCCTGGAAGGCCAGAACTGA |
| 33; 112 | AAHGRQVLGKRKR | GCGGCCCATGGTAGACAGGTGCTGGGCAAGAGAAAGCGGTGA |
| 34; 113 | AAVHKTVLGKRKYW | GCGGCCGTGCACAAGACAGTGCTGGGCAAGAGAAAGTACTGGTGA |
| 35; 114 | AAKRKYAVFLESQN | GCGGCCAAGCGGAAGTACGCCGTGTTCCTGGAAAGCCAGAACTGA |
| 36; 115 | AAKRKWMAFVMGDP | GCGGCCAAGAGAAAGTGGATGGCCTTCGTGATGGGCGACCCTTGA |
| 37; 116 | AAIPRKRSFAELYD | GCGGCCATCCCCAGAAAGAGAAGCTTCGCCGAGCTGTACGACTGA |
| 38; 117 | AAWAGRKRTWRDAF | GCGGCCTGGGCCGGAAGAAAAAGAACATGGCGGGACGCCTTCTGA |
| 39; 118 | AARLTPRKRAFSEV | GCGGCCAGACTGACCCCTAGAAAGCGGGCCTTTAGCGAGGTTTGA |
| 40; 119 | AAQSVLGKRKSRPF | GCGGCCCAGTCTGTGCTGGGCAAGAGAAAGAGCAGACCCTTCTGA |
| 41; 120 | AASSHRKRKFSDAF | GCGGCCAGCAGCCACCGGAAGAGAAAGTTCAGCGACGCCTTCTGA |
| 42; 121 | AAPSHRKRKFSDAF | GCGGCCCCCAGCCACCGGAAGAGAAAGTTCAGCGACGCCTTCTGA |
| 43; 122 | AATAHRKRKFSDAF | GCGGCCACAGCCCACCGGAAGAGAAAGTTCAGCGACGCCTTTTGA |
| 44; 123 | AARVQRKRKWSEAF | GCGGCCCGGGTGCAGCGGAAAAGAAAGTGGAGCGAGGCCTTCTGA |
| 45; 124 | AAHRYCGKRRRRTR | GCGGCCCACAGATACTGCGGCAAGCGGCGGAGAAGAACCAGATGA |
| 46; 125 | AATYSGVKRKRNVV | GCGGCCACATACAGCGGCGTGAAGCGGAAGAGAAACGTGGTGTGA |
| 47; 126 | AARLTRKRKYDCAF | GCGGCCCGGCTGACCAGAAAGCGGAAGTACGATTGCGCCTTCTGA |
| 48; 127 | AAKRKYSIYLGSQS | GCGGCCAAGCGGAAGTACAGCATCTACCTGGGCAGCCAGTCTTGA |
| 49; 128 | AALVNRKRRYWEAF | GCGGCCCTGGTCAACCGGAAGCGGAGATACTGGGAAGCCTTCTGA |
| 50; 129 | AATHIGYKRKRDSV | GCGGCCACCCACATCGGCTACAAGAGAAAGCGGGACAGCGTGTGA |
| 51; 130 | AAKKGKRKRLVRPW | GCGGCCAAGAAAGGCAAGCGGAAGAGACTCGTGCGGCCTTGGTGA |
| 52; 131 | AAYGRVSKRPRYQF | GCGGCCTACGGCAGAGTGTCCAAGAGGCCCAGATACCAGTTCTGA |
| 53; 132 | AASVLGKRSRTWE | GCGGCCTCTGTGCTGGGCAAGAGAAGCAGAACCTGGGAGTGA |
| 54; 133 | AATLERKRKLAVLY | GCGGCCACCCTGGAACGGAAGAGAAAACTGGCCGTGCTGTACTGA |
| 55; 134 | AARKRGRKRFRSV | GCGGCCCGGAAGAGAGGCCGGAAGAGATTCAGAAGCGTGTGA |
| 56; 135 | AAQRRLLKRKRGSL | GCGGCCCAGAGAAGGCTGCTGAAGAGAAAGAGAGGCAGCCTGTGA |
| 57; 136 | AAIGRKRGYSVAFG | GCGGCCATCGGCAGAAAGCGGGGCTACTCTGTGGCCTTTGGATGA |
| 58; 137 | AAKRPYSIAFPLGQ | GCGGCCAAGCGGCCCTACTCTATCGCCTTTCCACTGGGACAATGA |
| 59; 138 | AAITRKRKRDLVFT | GCGGCCATCACCCGGAAGAGAAAGCGCGACCTGGTGTTCACATGA |
| 60; 139 | AAKRTWAQAFTE | GCGGCCAAGAGAACATGGGCCCAAGCCTTCACCGAGTGA |
| 61; 140 | AAKRRYSDAFRLPV | GCGGCCAAGCGGAGATACAGCGACGCCTTCAGACTGCCTGTTTGA |
| 62; 141 | AAKRSWSMAFC | GCGGCCAAGCGGTCTTGGAGCATGGCCTTTTGCTGA |
| 63; 142 | AAISRKRKRDLEFV | GCGGCCATCAGCCGGAAGAGAAAGCGCGACCTGGAATTCGTGTGA |
| 64; 143 | AAIGRKRVWAVAFY | GCGGCCATCGGACGGAAAAGAGTGTGGGCCGTCGCCTTCTATTGA |
| 65; 144 | AAKRKYSDAFGLPV | GCGGCCAAGCGGAAGTACAGCGACGCCTTTGGACTGCCTGTTTGA |
| 66; 145 | AAKRKRWENDIP | GCGGCCAAGCGGAAGAGATGGGAGAACGACATCCCCTGA |
| 67; 146 | AAKRKRWENNIP | GCGGCCAAGCGGAAGAGATGGGAGAACAACATCCCCTGA |
| 68; 147 | AATGGVMKRKRGSV | GCGGCCACAGGCGGCGTGATGAAGAGAAAAAGGGGCAGCGTTTGA |
| 69; 148 | AALPKKRKFSEISS | GCGGCCCTGCCCAAGAAGCGGAAGTTCAGCGAGATCAGCAGCTGA |
| 70; 149 | AALSGTKRKRAYFI | GCGGCCCTGAGCGGCACCAAGAGAAAGCGGGCCTACTTCATCTGA |
| 71; 150 | AAPSRKRKRDHYAV | GCGGCCCCCAGCAGAAAGAGAAAGCGGGATCACTACGCCGTGTGA |
| 72; 151 | AAEPNPRKRKRSEL | GCGGCCGAGCCCAATCCTCGGAAGAGAAAGAGAAGCGAGCTGTGA |
| 73; 152 | AAPILPLKRRRGSP | GCGGCCCCTATCCTGCCTCTGAAGAGAAGAAGAGGCAGCCCCTGA |
| 74; 153 | AAQIGKKRKRDYLD | GCGGCCCAGATCGGCAAGAAGCGGAAGAGAGACTACCTGGACTGA |
| 75; 154 | AAPSRKRKRESDHI | GCGGCCCCCTCCAGAAAGCGGAAGAGAGAGAGCGACCACATCTGA |
| 76; 155 | AAKRGKRKRLVRPW | GCGGCCAAGCGGGGCAAGAGAAAAAGACTCGTGCGGCCTTGGTGA |
| 77; 156 | AARSSGILGKRKFE | GCGGCCAGAAGCTCTGGCATCCTGGGCAAGAGAAAGTTCGAGTGA |
| 78; 157 | AAKRPSATVHLCPVPRK | GCGGCCAAAAGACCTAGCGCCACCGTGCACCTGTGTCCTGTGCCT |
| | R | AGAAAGAGATGA |
| 79; 158 | AALGKRYDRDWDYK | GCGGCCCTGGGCAAGAGATACGACAGAGACTGGGACTACAAGTGA |

ªThe first SEQ ID NO corresponds to the amino acid sequence; the second SEQ ID NO corresponds to the nucleic acid sequence.

TABLE 2
Cleavage activity of SpCas9-NLS fusion proteins in HEK293 cells.

| Cas9-NLS Fusion | NLS AA | % Cleavage | |
|---|---|---|---|
| Protein Sequence | Sequence | (Average)^{a} | Std Dev |
| SEQ ID NO: 161 | SEQ ID NO: 1 (SV40) | 37.8 | 0.9 |
| SEQ ID NO232 | SEQ ID NO: 72 | 70.7 | 0.3 |
| SEQ ID NO: 234 | SEQ ID NO: 74 | 66.1 | 2.3 |
| SEQ ID NO: 235 | SEQ ID NO: 75 | 64.1 | 8.6 |
| SEQ ID NO: 207 | SEQ ID NO: 47 | 63.8 | 0.5 |
| SEQ ID NO: 202 | SEQ ID NO: 42 | 63.5 | 1.8 |
| SEQ ID NO: 231 | SEQ ID NO: 71 | 63.5 | 4.0 |
| SEQ ID NO: 223 | SEQ ID NO: 63 | 62.9 | 5.1 |
| SEQ ID NO: 201 | SEQ ID NO: 41 | 62.9 | 0.6 |
| SEQ ID NO: 243 | SEQ ID NO: 43 | 60.8 | 1.4 |
| SEQ ID NO: 225 | SEQ ID NO: 65 | 59.8 | 3.8 |
| SEQ ID NO: 212 | SEQ ID NO: 52 | 59.5 | 1.0 |
| SEQ ID NO: 209 | SEQ ID NO: 49 | 58.2 | 2.6 |
| SEQ ID NO: 175 | SEQ ID NO: 15 | 58.0 | 1.2 |
| SEQ ID NO: 204 | SEQ ID NO: 44 | 57.3 | 3.6 |
| SEQ ID NO: 210 | SEQ ID NO: 50 | 57.2 | 1.0 |
| SEQ ID NO: 237 | SEQ ID NO: 77 | 54.8 | 1.4 |
| SEQ ID NO: 199 | SEQ ID NO: 39 | 54.6 | 0.3 |
| SEQ ID NO: 215 | SEQ ID NO: 55 | 54.4 | 4.1 |
| SEQ ID NO: 220 | SEQ ID NO: 60 | 54.1 | 2.7 |
| SEQ ID NO: 177 | SEQ ID NO: 17 | 54.0 | 0.5 |
| SEQ ID NO: 238 | SEQ ID NO: 78 | 53.8 | 1.5 |
| SEQ ID NO: 200 | SEQ ID NO: 40 | 52.7 | 1.5 |
| SEQ ID NO: 193 | SEQ ID NO: 33 | 52.3 | 4.5 |
| SEQ ID NO: 239 | SEQ ID NO: 79 | 51.7 | 0.3 |
| SEQ ID NO: 218 | SEQ ID NO: 58 | 51.7 | 2.3 |
| SEQ ID NO: 191 | SEQ ID NO: 31 | 49.6 | 2.6 |
| SEQ ID NO: 174 | SEQ ID NO: 14 | 49.5 | 2.6 |
| SEQ ID NO: 173 | SEQ ID NO: 13 | 49.2 | 2.8 |
| SEQ ID NO: 219 | SEQ ID NO: 59 | 49.0 | 5.2 |
| SEQ ID NO: 229 | SEQ ID NO: 69 | 48.7 | 4.6 |
| SEQ ID NO: 183 | SEQ ID NO: 23 | 48.7 | 2.1 |
| SEQ ID NO: 198 | SEQ ID NO: 38 | 48.3 | 1.1 |
| SEQ ID NO: 186 | SEQ ID NO: 26 | 47.7 | 1.8 |
| SEQ ID NO: 176 | SEQ ID NO: 16 | 47.7 | 1.1 |
| SEQ ID NO: 226 | SEQ ID NO: 66 | 47.5 | 6.0 |
| SEQ ID NO: 230 | SEQ ID NO: 70 | 47.3 | 2.2 |
| SEQ ID NO: 206 | SEQ ID NO: 46 | 47.3 | 2.9 |
| SEQ ID NO: 207 | SEQ ID NO: 67 | 47.1 | 4.2 |
| SEQ ID NO: 164 | SEQ ID NO: 4 | 46.8 | 2.9 |
| SEQ ID NO: 211 | SEQ ID NO: 51 | 46.3 | 1.4 |
| SEQ ID NO: 178 | SEQ ID NO: 18 | 45.6 | 0.6 |
| SEQ ID NO: 194 | SEQ ID NO: 34 | 45.0 | 6.5 |
| SEQ ID NO: 170 | SEQ ID NO: 10 | 44.2 | 0.9 |
| SEQ ID NO: 222 | SEQ ID NO: 62 | 44.0 | 2.4 |
| SEQ ID NO: 217 | SEQ ID NO: 57 | 43.9 | 2.9 |
| SEQ ID NO: 179 | SEQ ID NO: 19 | 43.3 | 0.9 |
| SEQ ID NO: 208 | SEQ ID NO: 48 | 42.9 | 1.3 |
| SEQ ID NO: 172 | SEQ ID NO: 12 | 42.3 | 1.8 |
| SEQ ID NO: 171 | SEQ ID NO: 11 | 41.7 | 0.2 |
| SEQ ID NO: 221 | SEQ ID NO: 61 | 41.3 | 2.2 |
| SEQ ID NO: 162 | SEQ ID NO: 2 | 40.6 | 2.4 |
| SEQ ID NO: 197 | SEQ ID NO: 37 | 40.5 | 9.4 |
| SEQ ID NO: 184 | SEQ ID NO: 24 | 40.4 | 4.1 |
| SEQ ID NO: 188 | SEQ ID NO: 28 | 40.4 | 3.6 |
| SEQ ID NO: 192 | SEQ ID NO: 32 | 40.1 | 3.4 |
| SEQ ID NO: 195 | SEQ ID NO: 35 | 40.1 | 4.6 |
| SEQ ID NO: 228 | SEQ ID NO: 68 | 39.9 | 1.3 |
| SEQ ID NO: 213 | SEQ ID NO: 53 | 39.5 | 1.2 |
| SEQ ID NO: 214 | SEQ ID NO: 54 | 39.4 | 2.3 |
| SEQ ID NO: 163 | SEQ ID NO: 3 | 39.2 | 2.9 |
| SEQ ID NO: 189 | SEQ ID NO: 29 | 38.9 | 2.4 |
| SEQ ID NO: 196 | SEQ ID NO: 36 | 38.3 | 0.6 |
| SEQ ID NO: 224 | SEQ ID NO: 64 | 37.7 | 1.4 |
| SEQ ID NO: 167 | SEQ ID NO: 7 | 37.5 | 2.8 |
| SEQ ID NO: 166 | SEQ ID NO: 6 | 37.1 | 5.3 |
| SEQ ID NO: 165 | SEQ ID NO: 5 | 36.8 | 3.4 |
| SEQ ID NO: 180 | SEQ ID NO: 20 | 36.0 | 1.6 |
| SEQ ID NO: 181 | SEQ ID NO: 21 | 35.9 | 2.9 |
| SEQ ID NO: 236 | SEQ ID NO: 76 | 35.6 | 0.5 |
| SEQ ID NO: 205 | SEQ ID NO: 45 | 35.2 | 1.4 |
| SEQ ID NO: 187 | SEQ ID NO: 27 | 33.0 | 6.2 |
| SEQ ID NO: 233 | SEQ ID NO: 73 | 32.7 | 0.6 |
| SEQ ID NO: 190 | SEQ ID NO: 30 | 31.9 | 0.6 |
| SEQ ID NO: 168 | SEQ ID NO: 8 | 31.3 | 3.5 |
| SEQ ID NO: 182 | SEQ ID NO: 22 | 29.2 | 0.5 |
| SEQ ID NO: 216 | SEQ ID NO: 56 | 26.5 | 4.2 |
| SEQ ID NO: 185 | SEQ ID NO: 25 | 22.9 | 5.3 |
| SEQ ID NO: 169 | SEQ ID NO: 9 | 21.6 | 0.9 |

^{a}Cleavage activity as measured by a T7E1 assay.

[0039] In particular, Cas9-NLS fusion proteins including NLS motifs having 10% or greater genome editing activity relative to a Cas9-NLS fusion protein having a SV40 NLS motif are preferred. Exemplary preferred NLS amino acid sequences include SEQ ID NO: 4, 11, 12, 13, 14, 15, 16, 17, 18, 19, 23, 26, 31, 33, 34, 38, 39, 40, 41, 42, 43, 44, 46, 47, 48, 49, 50, 51, 52, 55, 57, 58, 59, 60, 62, 63, 65, 66, 67, 69, 70, 71, 72, 74, 75, 77, 78, and 79. Even more preferred NLS amino acid sequences include SEQ ID NO: 15, 17, 33, 39, 40, 41, 42, 43, 44, 47, 49, 50, 52, 55, 58, 60, 63, 65, 71, 72, 74, 75, 77, 78, and 79. Highly preferred NLS amino acid sequences include SEQ ID NO: 41, 42, 43, 47, 63, 65, 71, 72, 74, and 75.

### Modularity and Portability of NLS Amino Acid Sequences to Other Proteins

[0040] Our previous work with CRISPR protein-NLS fusions demonstrated that NLS motifs have remarkable utility as modular cassettes for use in CRISPR proteins and other proteins generally. In this regard, a fusion protein having an NLS amino acid sequence can be configured in which the NLS amino acid sequence can be fused at the N-terminus or C-terminus of the target protein to effect nuclear localization. Additionally, a plurality of NLS amino acid sequences can be used in tandem or dispersed at the disparate locations within the target protein sequence to effect nuclear localization.

### Applicability of the Novel NLS Amino Acid Sequences to Other CRISPR Proteins.

[0041] Our previous work with CRISPR protein-NLS fusions strongly supports our view that the NLS amino acid sequences of the present invention should improve nuclear localization of CRISPR proteins bearing our new NLS motifs. We therefore predict that such CRISPR protein-NLS fusion proteins would exhibit robust genome editing following introduction into cells with a competent gRNA. An example of such CRISPR proteins serving as additional CRISPR protein-NLS fusion protein candidates include Acidaminococcus sp. CRISPR/Cas12a (Cpf1) protein.

### Applications

[0042] In a first aspect, an amino acid sequence including a nuclear localization signal (NLS) is provided. The amino acid sequence of the NLS includes a member selected from the group consisting of SEQ ID NO: 4, 11, 12, 13, 14, 15, 16, 17, 18, 19, 23, 26, 31, 33, 34, 38, 39, 40, 41, 42, 43, 44, 46, 47, 48, 49, 50, 51, 52, 55, 57, 58, 59, 60, 62, 63, 65, 66, 67, 69, 70, 71, 72, 74, 75, 77, 78, and 79.

[0043] In a first respect, the amino acid sequence of the NLS is selected from the group consisting of SEQ ID NO: 15, 17, 33, 39, 40, 41, 42, 43, 44, 47, 49, 50, 52, 55, 58, 60, 63, 65, 71, 72, 74, 75, 77, 78, and 79. In a second respect, the amino acid sequence of the NLS is selected from the group consisting of SEQ ID NO: 41, 42, 43, 47, 63, 65, 71, 72, 74, and 75.

[0044] In a second aspect, a fusion protein including a first amino acid sequence and a second amino acid sequence is provided. The second amino acid sequence includes a nuclear localization signal (NLS), wherein the NLS comprises a member selected from the group consisting of SEQ ID NO: 4, 11, 12, 13, 14, 15, 16, 17, 18, 19, 23, 26, 31, 33, 34, 38, 39, 40, 41, 42, 43, 44, 46, 47, 48, 49, 50, 51, 52, 55, 57, 58, 59, 60, 62, 63, 65, 66, 67, 69, 70, 71, 72, 74, 75, 77, 78, and 79.

[0045] In a first respect, the NLS includes a member selected from the group consisting of SEQ ID NO: 15, 17, 33, 39, 40, 41, 42, 43, 44, 47, 49, 50, 52, 55, 58, 60, 63, 65, 71, 72, 74, 75, 77, 78, and 79. In a second respect, the NLS includes a member selected from the group consisting of SEQ ID NO: 15, 17, 33, 39, 40, 41, 42, 43, 44, 47, 49, 50, 52, 55, 58, 60, 63, 65, 71, 72, 74, 75, 77, 78, and 79. In a third respect, the second amino acid sequence is positioned at the N-terminus of the first amino acid sequence or wherein the second amino acid sequence is positioned at the C-terminus of the first amino acid sequence. In a fourth respect, a plurality of the second amino acid sequence is present in the fusion protein. In a fifth respect, the first amino acid sequence comprises SEQ ID NO: 159. In a sixth respect, the first amino acid sequence comprises SEQ ID NO: 159 and wherein the second amino acid sequence is positioned at the N-terminus of the first amino acid sequence or wherein the second amino acid sequence is positioned at the C-terminus of the first amino acid sequence, and/or wherein a plurality of the second amino acid sequence is present in the fusion protein.

[0046] In a third aspect, an isolated Cas9-NLS fusion protein is provided. The Cas9-NLS fusion protein includes a Cas9 amino acid sequence and a nuclear localization signal sequence (NLS). The isolated Cas9-NLS fusion protein is active in a CRISPR/Cas endonuclease system, wherein the isolated Cas9-NLS fusion protein comprises a member selected from the group consisting of SEQ ID NO: 162-239.

[0047] In a fourth aspect, a nucleic acid sequence encoding a nuclear localization signal (NLS) is provided. The nucleic acid sequence encoding the NLS includes a member selected from the group consisting of SEQ ID NO: 83, 90, 91, 92, 93, 94, 95, 96, 97, 98, 102, 105, 110, 113, 117, 118, 119, 120, 121, 122, 123, 125, 126, 127, 128, 129, 130, 131, 134, 136, 137, 138, 139, 141, 142, 144, 145, 146, 148, 149, 150, 151, 153, 154, 156, 157, and 158.

[0048] In a first respect, the nucleic acid sequence encoding the NLS includes a member selected from the group consisting of SEQ ID NO: 94, 96, 112, 118, 119, 120, 121, 122, 123, 126, 128, 129, 131, 134, 137, 139, 142, 144, 150, 151, 153, 154, 156, 157, and 158. In a second respect, the nucleic acid sequence encoding the NLS includes a member selected from the group consisting of SEQ ID NO: 120, 121, 122, 126, 142, 144, 150, 151, 153, and 154.

[0049] In a fifth aspect, an isolated nucleic acid sequence encoding the isolated Cas9-NLS fusion protein is provided. In a first respect, the isolated nucleic acid sequence includes a member selected from the group consisting of SEQ ID NO: 241-318.

[0050] In a sixth aspect, an isolated ribonucleoprotein complex is provided. The isolated ribonucleoprotein complex includes a Cas9-NLS fusion protein and a gRNA.

[0051] In a first respect, the gRNA includes a crRNA and a tracrRNA in stoichiometric (1:1) ratio. In a second respect, the crRNA includes an Alt-R® crRNA (Integrated DNA Technologies, Inc. (Skokie, IL (US)) directed against a specific editing target site for a given locus and the tracrRNA includes Alt-R® tracrRNA (Integrated DNA Technologies, Inc. (Skokie, IL (US)). In a third respect, the gRNA includes a sgRNA.

[0052] In a seventh aspect, a CRISPR/Cas endonuclease system is provided. The CRISPR/Cas endonuclease system includes an isolated Cas9-NLS fusion protein. The isolated Cas9-NLS fusion protein includes a member selected from the group consisting of SEQ ID NO: 162-239.

[0053] In a first respect, the CRISPR/Cas endonuclease system is encoded by a DNA expression vector having a member selected from the group consisting of SEQ ID NO: 241-318. In a second respect, the DNA expression vector is a plasmid-borne vector. In a third respect, the DNA expression vector is selected from a bacterial expression vector and a eukaryotic expression vector.

[0054] In an eighth aspect, a method of performing gene editing in a eukaryotic cell is provided. The method includes a step of contacting a candidate editing target site locus with an active CRISPR/Cas endonuclease system having a Cas9-NLS fusion protein. The Cas9-NLS fusion protein includes a member selected from the group consisting of SEQ ID NO: 162-239.

[0055] In a ninth aspect, a kit for performing gene editing in a eukaryotic cell is provided. The kit includes a Cas9-NLS fusion protein, optionally, a nucleic acid encoding a Cas9-NLS fusion protein, and, optionally, a gRNA. The Cas9-NLS fusion protein includes a member selected from the group consisting of SEQ ID NO: 162-239. Where included in the kit, the nucleic acid encoding a Cas9-NLS fusion protein includes a member selected from the group consisting of SEQ ID NO: 241-318.

[0056] The applications of Cas9-based tools are many and varied. They include, but are not limited to: plant gene editing, yeast gene editing, mammalian gene editing, editing of cells in the organs of live animals, editing of embryos, rapid generation of knockout/knock-in animal lines, generating an animal model of disease state, correcting a disease state, inserting a reporter gene, and whole genome functional screening.

### Example 1

Cas9-NLS Fusions Delivered by Plasmid into HEK293 Cells Yields a Spectrum of Editing Efficiencies

[0057] The following example demonstrates that SpCas9-NLS fusion proteins with a wide variety of different NLS sequences demonstrates a wide spectrum of editing efficiencies in human cells relative to a SpCas9-SV40 NLS control (see FIG. 1). The results indicate that the ideal NLS sequence for SpCas9 is not obvious, and that a highly efficient SpCas9 genome editing solution must be empirically determined as was done in this study. SpCas9-NLS fusion proteins were tested using guides that target the HPRT-38087 locus in human cells.

### Example 2

Purified Cas9-NLS Fusions Delivered as RNP Complexes into HEK293 and K562 Cells Yields Improved Editing Efficiencies Over Prior Art Cas9-NLS Fusion Protein Commercial Options

[0058] The following example demonstrates that purification and RNP delivery of the most active SpCas9-NLS fusion proteins (from Example 1) provides superior editing efficiencies over prior art Cas9-NLS fusion protein commercial options when delivered into either HEK293 or K562 cells (see FIG. 2A and FIG. 2B, respectively). The results indicate that the ideal NLS sequence for SpCas9 is not obvious, and that a highly efficient SpCas9 genome editing solution must be empirically determined as was done in this study. SpCas9-NLS fusion proteins were tested using guides that target the HPRT-38285 locus in human cells.

### Example 3

### Amino Acid and Nucleic Acid Sequences

[0059] The following amino acid and nucleic acid sequences support this disclosure.

Lengthy table referenced here
US20260103695A1-20260416-T00001
Please refer to the end of the specification for access instructions.

[0060] All references, including publications, patent applications, and patents, cited herein are hereby incorporated by reference to the same extent as if each reference were individually and specifically indicated to be incorporated by reference and were set forth in its entirety herein.

[0061] Preferred embodiments of this invention are described herein, including the best mode known to the inventors for carrying out the invention. Variations of those preferred embodiments may become apparent to those of ordinary skill in the art upon reading the foregoing description. The inventors expect skilled artisans to employ such variations as appropriate, and the inventors intend for the invention to be practiced otherwise than as specifically described herein. Accordingly, this invention includes all modifications and equivalents of the subject matter recited in the claims appended hereto as permitted by applicable law. Moreover, any combination of the above-described elements in all possible variations thereof is encompassed by the invention unless otherwise indicated herein or otherwise clearly contradicted by context.

LENGTHY TABLES
The patent application contains a lengthy table section. A copy of the table is available in electronic form from the USPTO web site (https://seqdata.uspto.gov/docdetail?docId=US20260103695A1). An electronic copy of the table will also be available from the USPTO upon request and payment of the fee set forth in 37 CFR 1.19(b)(3).

1. An amino acid sequence comprising a nuclear localization signal (NLS), wherein amino acid sequence of the NLS comprises a member selected from the group consisting of SEQ ID NO: 4, 11, 12, 13, 14, 15, 16, 17, 18, 19, 23, 26, 31, 33, 34, 38, 39, 40, 41, 42, 43, 44, 46, 47, 48, 49, 50, 51, 52, 55, 57, 58, 59, 60, 62, 63, 65, 66, 67, 69, 70, 71, 72, 74, 75, 77, 78, and 79.

2. The amino acid sequence of the NLS of claim 1, wherein amino acid sequence of the NLS is selected from the group consisting of SEQ ID NO: 15, 17, 33, 39, 40, 41, 42, 43, 44, 47, 49, 50, 52, 55, 58, 60, 63, 65, 71, 72, 74, 75, 77, 78, and 79.

3. The amino acid sequence of the NLS of claim 1, wherein amino acid sequence of the NLS is selected from the group consisting of SEQ ID NO: 41, 42, 43, 47, 63, 65, 71, 72, 74, and 75.

4. A fusion protein comprising a first amino acid sequence and a second amino acid sequence, wherein the second amino acid sequence comprises a nuclear localization signal (NLS), wherein the NLS comprises a member selected from the group consisting of SEQ ID NO: 4, 11, 12, 13, 14, 15, 16, 17, 18, 19, 23, 26, 31, 33, 34, 38, 39, 40, 41, 42, 43, 44, 46, 47, 48, 49, 50, 51, 52, 55, 57, 58, 59, 60, 62, 63, 65, 66, 67, 69, 70, 71, 72, 74, 75, 77, 78, and 79.

5. The fusion protein of claim 4, wherein the NLS comprises a member selected from the group consisting of SEQ ID NO: 15, 17, 33, 39, 40, 41, 42, 43, 44, 47, 49, 50, 52, 55, 58, 60, 63, 65, 71, 72, 74, 75, 77, 78, and 79.

6. The fusion protein of claim 4, wherein the NLS comprises a member selected from the group consisting of SEQ ID NO: 15, 17, 33, 39, 40, 41, 42, 43, 44, 47, 49, 50, 52, 55, 58, 60, 63, 65, 71, 72, 74, 75, 77, 78, and 79.

7. The fusion protein according to claim 4, wherein the second amino acid sequence is positioned at the N-terminus of the first amino acid sequence or wherein the second amino acid sequence is positioned at the C-terminus of the first amino acid sequence.

8. The fusion protein according to claim 4, wherein a plurality of the second amino acid sequence is present in the fusion protein.

9. The fusion protein according to claim 4, wherein the first amino acid sequence comprises SEQ ID NO: 159.

10. The fusion protein according to claim 4, wherein the first amino acid sequence comprises SEQ ID NO: 159 and wherein the second amino acid sequence is positioned at the N-terminus of the first amino acid sequence or wherein the second amino acid sequence is positioned at the C-terminus of the first amino acid sequence.

11. The fusion protein according to claim 10, wherein a plurality of the second amino acid sequence is present in the fusion protein.

12. An isolated Cas9-NLS fusion protein, wherein the Cas9-NLS fusion protein comprises a Cas9 amino acid sequence and a nuclear localization signal sequence (NLS), wherein the isolated Cas9-NLS fusion protein is active in a CRISPR/Cas endonuclease system, wherein the isolated Cas9-NLS fusion protein comprises a member selected from the group consisting of SEQ ID NO: 162-239.

13-15. (canceled)

16. An isolated nucleic acid sequence encoding the isolated Cas9-NLS fusion protein of claim 12.

17. The isolated nucleic acid sequence encoding the isolated Cas9-NLS fusion protein of claim 16, wherein the isolated nucleic acid sequence comprises a member selected from the group consisting of SEQ ID NO: 241-318.

18. An isolated ribonucleoprotein complex, wherein the isolated ribonucleoprotein complex comprises a Cas9-NLS fusion protein of claim 12 and a gRNA.

19. The isolated ribonucleoprotein complex of claim 18, wherein the gRNA comprises a crRNA and a tracrRNA in stoichiometric (1:1) ratio.

20. The isolated ribonucleoprotein complex of claim 19, wherein the crRNA comprises an Alt-R® crRNA directed against a specific editing target site for a given locus and the tracrRNA includes Alt-R® tracrRNA.

21. The isolated ribonucleoprotein complex of claim 19, wherein the gRNA comprises a sgRNA.

22-27. (canceled)

The application's sequence listing, which the Patent Office published only in electronic form, follows.

SEQUENCE LISTING (318 sequences)

SEQ ID NO: 1 - protein, 9 aa, synthetic construct
AAPKKKRKV

SEQ ID NO: 2 - protein, 19 aa, synthetic construct
AAKRKNSATVHLCPVPRKR

SEQ ID NO: 3 - protein, 21 aa, synthetic construct
AAKRPAELDGADNASQAAKRR

SEQ ID NO: 4 - protein, 19 aa, synthetic construct
AARKRNSATVHLCPVPRKR

SEQ ID NO: 5 - protein, 18 aa, synthetic construct
AAKRPATLANNSPAAKRR

SEQ ID NO: 6 - protein, 18 aa, synthetic construct
AAKRPATLANESPAAKRR

SEQ ID NO: 7 - protein, 19 aa, synthetic construct
AARRRNSATVHLCPVPRKR

SEQ ID NO: 8 - protein, 14 aa, synthetic construct
AADTRLGKRKRRPW

SEQ ID NO: 9 - protein, 16 aa, synthetic construct
AARRRSVLKRSWSVAF

SEQ ID NO: 10 - protein, 18 aa, synthetic construct
AAKRPATLANDSPAAKRR

SEQ ID NO: 11 - protein, 21 aa, synthetic construct
AAKRPAALAGAGNASQAAKRR

SEQ ID NO: 12 - protein, 21 aa, synthetic construct
AAKRPAELDEADNASQAAKRR

SEQ ID NO: 13 - protein, 14 aa, synthetic construct
AARRRKRRREWEDF

SEQ ID NO: 14 - protein, 14 aa, synthetic construct
AATSPSRKRKWDQV

SEQ ID NO: 15 - protein, 22 aa, synthetic construct
AAAVKRPAATKKAGQAKKKKLD

SEQ ID NO: 16 - protein, 14 aa, synthetic construct
AAPILGKRKRHLFL

SEQ ID NO: 17 - protein, 11 aa, synthetic construct
AAPAAKRVKLD

SEQ ID NO: 18 - protein, 27 aa, synthetic construct
AAMSRRRKANPTKLSENAKKLAKEVEN

SEQ ID NO: 19 - protein, 14 aa, synthetic construct
AATLGKRKRISCVT

SEQ ID NO: 20 - protein, 11 aa, synthetic construct
AAKLKIKRPVK

SEQ ID NO: 21 - protein, 14 aa, synthetic construct
AARVLGKRKREDRP

SEQ ID NO: 22 - protein, 14 aa, synthetic construct
AALLGKRKRPSIEH

SEQ ID NO: 23 - protein, 14 aa, synthetic construct
AAPVLGKRKRSLSS

SEQ ID NO: 24 - protein, 14 aa, synthetic construct
AAILGKRKRSHHPY

SEQ ID NO: 25 - protein, 14 aa, synthetic construct
AASMLGKRKRCIIS

SEQ ID NO: 26 - protein, 14 aa, synthetic construct
AASVLGKRKRHHLD

SEQ ID NO: 27 - protein, 14 aa, synthetic construct
AATVHLGKRRLRPW

SEQ ID NO: 28 - protein, 14 aa, synthetic construct
AASVLGKRKRHPKV

SEQ ID NO: 29 - protein, 14 aa, synthetic construct
AASILGKRKNRDPS

SEQ ID NO: 30 - protein, 14 aa, synthetic construct
AARVLGKRKTGRSP

SEQ ID NO: 31 - protein, 13 aa, synthetic construct
AAVLGKRKRDDCW

SEQ ID NO: 32 - protein, 14 aa, synthetic construct
AAKRKCAVFLEGQN

SEQ ID NO: 33 - protein, 13 aa, synthetic construct
AAHGRQVLGKRKR

SEQ ID NO: 34 - protein, 14 aa, synthetic construct
AAVHKTVLGKRKYW

SEQ ID NO: 35 - protein, 14 aa, synthetic construct
AAKRKYAVFLESQN

SEQ ID NO: 36 - protein, 14 aa, synthetic construct
AAKRKWMAFVMGDP

SEQ ID NO: 37 - protein, 14 aa, synthetic construct
AAIPRKRSFAELYD

SEQ ID NO: 38 - protein, 14 aa, synthetic construct
AAWAGRKRTWRDAF

SEQ ID NO: 39 - protein, 14 aa, synthetic construct
AARLTPRKRAFSEV

SEQ ID NO: 40 - protein, 14 aa, synthetic construct
AAQSVLGKRKSRPF

SEQ ID NO: 41 - protein, 14 aa, synthetic construct
AASSHRKRKFSDAF

SEQ ID NO: 42 - protein, 14 aa, synthetic construct
AAPSHRKRKFSDAF

SEQ ID NO: 43 - protein, 14 aa, synthetic construct
AATAHRKRKFSDAF

SEQ ID NO: 44 - protein, 14 aa, synthetic construct
AARVQRKRKWSEAF

SEQ ID NO: 45 - protein, 14 aa, synthetic construct
AAHRYCGKRRRRTR

SEQ ID NO: 46 - protein, 14 aa, synthetic construct
AATYSGVKRKRNVV

SEQ ID NO: 47 - protein, 14 aa, synthetic construct
AARLTRKRKYDCAF

SEQ ID NO: 48 - protein, 14 aa, synthetic construct
AAKRKYSIYLGSQS

SEQ ID NO: 49 - protein, 14 aa, synthetic construct
AALVNRKRRYWEAF

SEQ ID NO: 50 - protein, 14 aa, synthetic construct
AATHIGYKRKRDSV

SEQ ID NO: 51 - protein, 14 aa, synthetic construct
AAKKGKRKRLVRPW

SEQ ID NO: 52 - protein, 14 aa, synthetic construct
AAYGRVSKRPRYQF

SEQ ID NO: 53 - protein, 13 aa, synthetic construct
AASVLGKRSRTWE

SEQ ID NO: 54 - protein, 14 aa, synthetic construct
AATLERKRKLAVLY

SEQ ID NO: 55 - protein, 13 aa, synthetic construct
AARKRGRKRFRSV

SEQ ID NO: 56 - protein, 14 aa, synthetic construct
AAQRRLLKRKRGSL

SEQ ID NO: 57 - protein, 14 aa, synthetic construct
AAIGRKRGYSVAFG

SEQ ID NO: 58 - protein, 14 aa, synthetic construct
AAKRPYSIAFPLGQ

SEQ ID NO: 59 - protein, 14 aa, synthetic construct
AAITRKRKRDLVFT

SEQ ID NO: 60 - protein, 12 aa, synthetic construct
AAKRTWAQAFTE

SEQ ID NO: 61 - protein, 14 aa, synthetic construct
AAKRRYSDAFRLPV

SEQ ID NO: 62 - protein, 11 aa, synthetic construct
AAKRSWSMAFC

SEQ ID NO: 63 - protein, 14 aa, synthetic construct
AAISRKRKRDLEFV

SEQ ID NO: 64 - protein, 14 aa, synthetic construct
AAIGRKRVWAVAFY

SEQ ID NO: 65 - protein, 14 aa, synthetic construct
AAKRKYSDAFGLPV

SEQ ID NO: 66 - protein, 12 aa, synthetic construct
AAKRKRWENDIP

SEQ ID NO: 67 - protein, 12 aa, synthetic construct
AAKRKRWENNIP

SEQ ID NO: 68 - protein, 14 aa, synthetic construct
AATGGVMKRKRGSV

SEQ ID NO: 69 - protein, 14 aa, synthetic construct
AALPKKRKFSEISS

SEQ ID NO: 70 - protein, 14 aa, synthetic construct
AALSGTKRKRAYFI

SEQ ID NO: 71 - protein, 14 aa, synthetic construct
AAPSRKRKRDHYAV

SEQ ID NO: 72 - protein, 14 aa, synthetic construct
AAEPNPRKRKRSEL

SEQ ID NO: 73 - protein, 14 aa, synthetic construct
AAPILPLKRRRGSP

SEQ ID NO: 74 - protein, 14 aa, synthetic construct
AAQIGKKRKRDYLD

SEQ ID NO: 75 - protein, 14 aa, synthetic construct
AAPSRKRKRESDHI

SEQ ID NO: 76 - protein, 14 aa, synthetic construct
AAKRGKRKRLVRPW

SEQ ID NO: 77 - protein, 14 aa, synthetic construct
AARSSGILGKRKFE

SEQ ID NO: 78 - protein, 18 aa, synthetic construct
AAKRPSATVHLCPVPRKR

SEQ ID NO: 79 - protein, 14 aa, synthetic construct
AALGKRYDRDWDYK

SEQ ID NO: 80 - DNA, 30 bp, synthetic construct
  source 1..30: mol_type = other DNA
gcggcccccaagaaaaagcggaaggtgtga

SEQ ID NO: 81 - DNA, 60 bp, synthetic construct
  source 1..60: mol_type = other DNA
gcggccaagagaaagaacagcgccaccgtgcacctgtgtcctgtgcctagaaagagatga

SEQ ID NO: 82 - DNA, 66 bp, synthetic construct
  source 1..66: mol_type = other DNA
gcggccaaaagacccgccgaactggacggcgccgataatgcttctcaggccgccaagagaagatga

SEQ ID NO: 83 - DNA, 60 bp, synthetic construct
  source 1..60: mol_type = other DNA
gcggcccggaagagaaatagcgccaccgtgcacctgtgtcctgtgcctagaaagagatga

SEQ ID NO: 84 - DNA, 57 bp, synthetic construct
  source 1..57: mol_type = other DNA
gcggccaagaggcctgccacactggccaacaattctccagccgccaagcggagatga

SEQ ID NO: 85 - DNA, 57 bp, synthetic construct
  source 1..57: mol_type = other DNA
gcggccaagaggcctgccacactggccaatgaatctccagccgccaagcggagatga

SEQ ID NO: 86 - DNA, 60 bp, synthetic construct
  source 1..60: mol_type = other DNA
gcggcccggagaagaaatagcgccaccgtgcacctgtgtcctgtgcctagaaagagatga

SEQ ID NO: 87 - DNA, 45 bp, synthetic construct
  source 1..45: mol_type = other DNA
gcggccgataccagactgggcaagagaaagagaaggccctggtga

SEQ ID NO: 88 - DNA, 51 bp, synthetic construct
  source 1..51: mol_type = other DNA
gcggcccggagaagaagcgtgctgaagagatcttggagcgtggccttctga

SEQ ID NO: 89 - DNA, 57 bp, synthetic construct
  source 1..57: mol_type = other DNA
gcggccaagaggcctgccacactggccaatgattctccagccgccaagcggagatga

SEQ ID NO: 90 - DNA, 66 bp, synthetic construct
  source 1..66: mol_type = other DNA
gcggccaaaagacctgctgctctggctggcgccggaaatgcttctcaggccgccaaaagaagatga

SEQ ID NO: 91 - DNA, 66 bp, synthetic construct
  source 1..66: mol_type = other DNA
gcggccaaaagacccgccgagctggacgaagccgataatgcttctcaggccgccaagcggagatga

SEQ ID NO: 92 - DNA, 45 bp, synthetic construct
  source 1..45: mol_type = other DNA
gcggcccggagaagaaagcggcgcagagagtgggaagatttctga

SEQ ID NO: 93 - DNA, 45 bp, synthetic construct
  source 1..45: mol_type = other DNA
gcggccacaagccctagccggaagagaaagtgggaccaagtgtga

SEQ ID NO: 94 - DNA, 69 bp, synthetic construct
  source 1..69: mol_type = other DNA
gcggccgccgtgaaaagacctgccgccacaaagaaagccggccaggccaagaagaagaagctggactga

SEQ ID NO: 95 - DNA, 45 bp, synthetic construct
  source 1..45: mol_type = other DNA
gcggcccctatcctgggcaagagaaagcggcacctgtttctgtga

SEQ ID NO: 96 - DNA, 36 bp, synthetic construct
  source 1..36: mol_type = other DNA
gcggcccctgccgccaagagagtgaagctggattga

SEQ ID NO: 97 - DNA, 84 bp, synthetic construct
  source 1..84: mol_type = other DNA
gcggccatgagcagacggcggaaggccaatcctaccaagctgagcgagaacgccaagaaactggccaaagaggtggaaaactga

SEQ ID NO: 98 - DNA, 45 bp, synthetic construct
  source 1..45: mol_type = other DNA
gcggccaccctgggaaagagaaagcggatcagctgcgtgacctga

SEQ ID NO: 99 - DNA, 36 bp, synthetic construct
  source 1..36: mol_type = other DNA
gcggccaagctgaagatcaagcggcccgtgaagtga

SEQ ID NO: 100 - DNA, 45 bp, synthetic construct
  source 1..45: mol_type = other DNA
gcggccagagtgctgggcaagcgcaagagagaggacagaccttga

SEQ ID NO: 101 - DNA, 45 bp, synthetic construct
  source 1..45: mol_type = other DNA
gcggccctgctgggcaagagaaagaggcctagcatcgagcactga

SEQ ID NO: 102 - DNA, 45 bp, synthetic construct
  source 1..45: mol_type = other DNA
gcggcccctgtgctgggcaagagaaagagaagcctgagcagctga

SEQ ID NO: 103 - DNA, 45 bp, synthetic construct
  source 1..45: mol_type = other DNA
gcggccatcctgggcaagcgcaagagaagccaccatccttactga

SEQ ID NO: 104 - DNA, 45 bp, synthetic construct
  source 1..45: mol_type = other DNA
gcggccagcatgctgggcaagagaaagcggtgcatcatcagctga

SEQ ID NO: 105 - DNA, 45 bp, synthetic construct
  source 1..45: mol_type = other DNA
gcggcctctgtgctgggcaagagaaagagacaccacctggactga

SEQ ID NO: 106 - DNA, 45 bp, synthetic construct
  source 1..45: mol_type = other DNA
gcggccacagtgcacctgggcaagagaaggctcagaccttggtga

SEQ ID NO: 107 - DNA, 45 bp, synthetic construct
  source 1..45: mol_type = other DNA
gcggcctctgtgctgggcaagagaaagcggcaccctaaggtttga

SEQ ID NO: 108 - DNA, 45 bp, synthetic construct
  source 1..45: mol_type = other DNA
gcggccagcatcctgggcaagagaaagaacagggaccccagctga

SEQ ID NO: 109 - DNA, 45 bp, synthetic construct
  source 1..45: mol_type = other DNA
gcggccagagtgctgggcaagagaaagaccggcagaagcccttga

SEQ ID NO: 110 - DNA, 42 bp, synthetic construct
  source 1..42: mol_type = other DNA
gcggccgtgctgggcaagagaaagagagatgactgctggtga

SEQ ID NO: 111 - DNA, 45 bp, synthetic construct
  source 1..45: mol_type = other DNA
gcggccaagagaaagtgcgccgtgttcctggaaggccagaactga

SEQ ID NO: 112 - DNA, 42 bp, synthetic construct
  source 1..42: mol_type = other DNA
gcggcccatggtagacaggtgctgggcaagagaaagcggtga

SEQ ID NO: 113 - DNA, 45 bp, synthetic construct
  source 1..45: mol_type = other DNA
gcggccgtgcacaagacagtgctgggcaagagaaagtactggtga

SEQ ID NO: 114 - DNA, 45 bp, synthetic construct
  source 1..45: mol_type = other DNA
gcggccaagcggaagtacgccgtgttcctggaaagccagaactga

SEQ ID NO: 115 - DNA, 45 bp, synthetic construct
  source 1..45: mol_type = other DNA
gcggccaagagaaagtggatggccttcgtgatgggcgacccttga

SEQ ID NO: 116 - DNA, 45 bp, synthetic construct
  source 1..45: mol_type = other DNA
gcggccatccccagaaagagaagcttcgccgagctgtacgactga

SEQ ID NO: 117 - DNA, 45 bp, synthetic construct
  source 1..45: mol_type = other DNA
gcggcctgggccggaagaaaaagaacatggcgggacgccttctga

SEQ ID NO: 118 - DNA, 45 bp, synthetic construct
  source 1..45: mol_type = other DNA
gcggccagactgacccctagaaagcgggcctttagcgaggtttga

SEQ ID NO: 119 - DNA, 45 bp, synthetic construct
  source 1..45: mol_type = other DNA
gcggcccagtctgtgctgggcaagagaaagagcagacccttctga

SEQ ID NO: 120 - DNA, 45 bp, synthetic construct
  source 1..45: mol_type = other DNA
gcggccagcagccaccggaagagaaagttcagcgacgccttctga

SEQ ID NO: 121 - DNA, 45 bp, synthetic construct
  source 1..45: mol_type = other DNA
gcggcccccagccaccggaagagaaagttcagcgacgccttctga

SEQ ID NO: 122 - DNA, 45 bp, synthetic construct
  source 1..45: mol_type = other DNA
gcggccacagcccaccggaagagaaagttcagcgacgccttttga

SEQ ID NO: 123 - DNA, 45 bp, synthetic construct
  source 1..45: mol_type = other DNA
gcggcccgggtgcagcggaaaagaaagtggagcgaggccttctga

SEQ ID NO: 124 - DNA, 45 bp, synthetic construct
  source 1..45: mol_type = other DNA
gcggcccacagatactgcggcaagcggcggagaagaaccagatga

SEQ ID NO: 125 - DNA, 45 bp, synthetic construct
  source 1..45: mol_type = other DNA
gcggccacatacagcggcgtgaagcggaagagaaacgtggtgtga

SEQ ID NO: 126 - DNA, 45 bp, synthetic construct
  source 1..45: mol_type = other DNA
gcggcccggctgaccagaaagcggaagtacgattgcgccttctga

SEQ ID NO: 127 - DNA, 45 bp, synthetic construct
  source 1..45: mol_type = other DNA
gcggccaagcggaagtacagcatctacctgggcagccagtcttga

SEQ ID NO: 128 - DNA, 45 bp, synthetic construct
  source 1..45: mol_type = other DNA
gcggccctggtcaaccggaagcggagatactgggaagccttctga

SEQ ID NO: 129 - DNA, 45 bp, synthetic construct
  source 1..45: mol_type = other DNA
gcggccacccacatcggctacaagagaaagcgggacagcgtgtga

SEQ ID NO: 130 - DNA, 45 bp, synthetic construct
  source 1..45: mol_type = other DNA
gcggccaagaaaggcaagcggaagagactcgtgcggccttggtga

SEQ ID NO: 131 - DNA, 45 bp, synthetic construct
  source 1..45: mol_type = other DNA
gcggcctacggcagagtgtccaagaggcccagataccagttctga

SEQ ID NO: 132 - DNA, 42 bp, synthetic construct
  source 1..42: mol_type = other DNA
gcggcctctgtgctgggcaagagaagcagaacctgggagtga

SEQ ID NO: 133 - DNA, 45 bp, synthetic construct
  source 1..45: mol_type = other DNA
gcggccaccctggaacggaagagaaaactggccgtgctgtactga

SEQ ID NO: 134 - DNA, 42 bp, synthetic construct
  source 1..42: mol_type = other DNA
gcggcccggaagagaggccggaagagattcagaagcgtgtga

SEQ ID NO: 135 - DNA, 45 bp, synthetic construct
  source 1..45: mol_type = other DNA
gcggcccagagaaggctgctgaagagaaagagaggcagcctgtga

SEQ ID NO: 136 - DNA, 45 bp, synthetic construct
  source 1..45: mol_type = other DNA
gcggccatcggcagaaagcggggctactctgtggcctttggatga

SEQ ID NO: 137 - DNA, 45 bp, synthetic construct
  source 1..45: mol_type = other DNA
gcggccaagcggccctactctatcgcctttccactgggacaatga

SEQ ID NO: 138 - DNA, 45 bp, synthetic construct
  source 1..45: mol_type = other DNA
gcggccatcacccggaagagaaagcgcgacctggtgttcacatga

SEQ ID NO: 139 - DNA, 39 bp, synthetic construct
  source 1..39: mol_type = other DNA
gcggccaagagaacatgggcccaagccttcaccgagtga

SEQ ID NO: 140 - DNA, 45 bp, synthetic construct
  source 1..45: mol_type = other DNA
gcggccaagcggagatacagcgacgccttcagactgcctgtttga

SEQ ID NO: 141 - DNA, 36 bp, synthetic construct
  source 1..36: mol_type = other DNA
gcggccaagcggtcttggagcatggccttttgctga

SEQ ID NO: 142 - DNA, 45 bp, synthetic construct
  source 1..45: mol_type = other DNA
gcggccatcagccggaagagaaagcgcgacctggaattcgtgtga

SEQ ID NO: 143 - DNA, 45 bp, synthetic construct
  source 1..45: mol_type = other DNA
gcggccatcggacggaaaagagtgtgggccgtcgccttctattga

SEQ ID NO: 144 - DNA, 45 bp, synthetic construct
  source 1..45: mol_type = other DNA
gcggccaagcggaagtacagcgacgcctttggactgcctgtttga

SEQ ID NO: 145 - DNA, 39 bp, synthetic construct
  source 1..39: mol_type = other DNA
gcggccaagcggaagagatgggagaacgacatcccctga

SEQ ID NO: 146 - DNA, 39 bp, synthetic construct
  source 1..39: mol_type = other DNA
gcggccaagcggaagagatgggagaacaacatcccctga

SEQ ID NO: 147 - DNA, 45 bp, synthetic construct
  source 1..45: mol_type = other DNA
gcggccacaggcggcgtgatgaagagaaaaaggggcagcgtttga

SEQ ID NO: 148 - DNA, 45 bp, synthetic construct
  source 1..45: mol_type = other DNA
gcggccctgcccaagaagcggaagttcagcgagatcagcagctga

SEQ ID NO: 149 - DNA, 45 bp, synthetic construct
  source 1..45: mol_type = other DNA
gcggccctgagcggcaccaagagaaagcgggcctacttcatctga

SEQ ID NO: 150 - DNA, 45 bp, synthetic construct
  source 1..45: mol_type = other DNA
gcggcccccagcagaaagagaaagcgggatcactacgccgtgtga

SEQ ID NO: 151 - DNA, 45 bp, synthetic construct
  source 1..45: mol_type = other DNA
gcggccgagcccaatcctcggaagagaaagagaagcgagctgtga

SEQ ID NO: 152 - DNA, 45 bp, synthetic construct
  source 1..45: mol_type = other DNA
gcggcccctatcctgcctctgaagagaagaagaggcagcccctga

SEQ ID NO: 153 - DNA, 45 bp, synthetic construct
  source 1..45: mol_type = other DNA
gcggcccagatcggcaagaagcggaagagagactacctggactga

SEQ ID NO: 154 - DNA, 45 bp, synthetic construct
  source 1..45: mol_type = other DNA
gcggccccctccagaaagcggaagagagagagcgaccacatctga

SEQ ID NO: 155 - DNA, 45 bp, synthetic construct
  source 1..45: mol_type = other DNA
gcggccaagcggggcaagagaaaaagactcgtgcggccttggtga

SEQ ID NO: 156 - DNA, 45 bp, synthetic construct
  source 1..45: mol_type = other DNA
gcggccagaagctctggcatcctgggcaagagaaagttcgagtga

SEQ ID NO: 157 - DNA, 57 bp, synthetic construct
  source 1..57: mol_type = other DNA
gcggccaaaagacctagcgccaccgtgcacctgtgtcctgtgcctagaaagagatga

SEQ ID NO: 158 - DNA, 45 bp, synthetic construct
  source 1..45: mol_type = other DNA
gcggccctgggcaagagatacgacagagactgggactacaagtga

SEQ ID NO: 159 - protein, 1368 aa, synthetic construct [sequence omitted]

SEQ ID NO: 160 - DNA, 4290 bp, synthetic construct
  source 1..4290: mol_type = other DNA
atgggcaagcccatccctaaccccctgttggggctggacagcaccgctcccaaaaagaaaaggaaggtgggcattcacggcgtgcctgcggccgacaaaaagtacagcatcggccttgatatcggcaccaatagcgtgggctgggccgttatcacagacgaatacaaggtacccagcaagaagttcaaggtgctggggaatacagacaggcactctatcaagaaaaaccttatcggggctctgctgtttgactcaggcgagaccgccgaggccaccaggttgaagaggaccgcaaggcgaaggtacacccggaggaagaacaggatctgctatctgcaggagatcttcagcaacgagatggccaaggtggacgacagcttcttccacaggctggaggagagcttccttgtcgaggaggataagaagcacgaacgacaccccatcttcggcaacatagtcgacgaggtcgcttatcacgagaagtaccccaccatctaccacctgcgaaagaaattggtggatagcaccgataaagccgacttgcgacttatctacttggctctggcgcacatgattaagttcaggggccacttcctgatcgagggcgaccttaaccccgacaacagtgacgtagacaaattgttcatccagcttgtacagacctataaccagctgttcgaggaaaaccctattaacgccagcggggtggatgcgaaggccatacttagcgccaggctgagcaaaagcaggcgcttggagaacctgatagcccagctgcccggtgaaaagaagaacggcctcttcggtaatctgattgccctgagcctgggcctgacccccaacttcaagagcaacttcgacctggcagaagatgccaagctgcagttgagtaaggacacctatgacgacgacttggacaatctgctcgcccaaatcggcgaccagtacgctgacctgttcctcgccgccaagaacctttctgacgcaatcctgcttagcgatatccttagggtgaacacagagatcaccaaggcccccctgagcgccagcatgatcaagaggtacgacgagcaccatcaggacctgacccttctgaaggccctggtgaggcagcaactgcccgagaagtacaaggagatctttttcgaccagagcaagaacggctacgccggctacatcgacggcggagccagccaagaggagttctacaagttcatcaagcccatcctggagaagatggatggcaccgaggagctgctggtgaagctgaacagggaagatttgctccggaagcagaggacctttgacaacggtagcatcccccaccagatccacctgggcgagctgcacgcaatactgaggcgacaggaggatttctaccccttcctcaaggacaatagggagaaaatcgaaaagattctgaccttcaggatcccctactacgtgggccctcttgccaggggcaacagccgattcgcttggatgacaagaaagagcgaggagaccatcaccccctggaacttcgaggaagtggtggacaaaggagcaagcgcgcagtctttcatcgaacggatgaccaatttcgacaaaaacctgcctaacgagaaggtgctgcccaagcacagcctgctttacgagtacttcaccgtgtacaacgagctcaccaaggtgaaatatgtgaccgagggcatgcgaaaacccgctttcctgagcggcgagcagaagaaggccatcgtggacctgctgttcaagaccaacaggaaggtgaccgtgaagcagctgaaggaggactacttcaagaagatcgagtgctttgatagcgtggaaataagcggcgtggaggacaggttcaacgccagcctgggcacctaccacgacttgttgaagataatcaaagacaaggatttcctggataatgaggagaacgaggatatactcgaggacatcgtgctgactttgaccctgtttgaggaccgagagatgattgaagaaaggctcaaaacctacgcccacctgttcgacgacaaagtgatgaaacaactgaagagacgaagatacaccggctggggcagactgtccaggaagctcatcaacggcattagggacaagcagagcggcaagaccatcctggatttcctgaagtccgacggcttcgccaaccgaaacttcatgcagctgattcacgatgacagcttgaccttcaaggaggacatccagaaggcccaggttagcggccagggcgactccctgcacgaacatattgcaaacctggcaggctcccctgcgatcaagaagggcatactgcagaccgttaaggttgtggacgaattggtcaaggtcatgggcaggcacaagcccgaaaacatagttatagagatggccagagagaaccagaccacccaaaagggccagaagaacagccgggagcgcatgaaaaggatcgaggagggtatcaaggaactcggaagccagatcctcaaagagcaccccgtggagaatacccagctccagaacgagaagctgtacctgtactacctgcagaacggcagggacatgtacgttgaccaggagttggacatcaacaggctttcagactatgacgtggatcacatagtgccccagagctttcttaaagacgatagcatcgacaacaaggtcctgacccgctccgacaaaaacaggggcaaaagcgacaacgtgccaagcgaagaggtggttaaaaagatgaagaactactggaggcaactgctcaacgcgaaattgatcacccagagaaagttcgataacctgaccaaggccgagaggggcggactctccgaacttgacaaagcgggcttcataaagaggcagctggtcgagacccgacagatcacgaagcacgtggcccaaatcctcgacagcagaatgaataccaagtacgatgagaatgacaaactcatcagggaagtgaaagtgattaccctgaagagcaagttggtgtccgactttcgcaaagatttccagttctacaaggtgagggagatcaacaactaccaccatgcccacgacgcatacctgaacgccgtggtcggcaccgccctgattaagaagtatccaaagctggagtccgaatttgtctacggcgactacaaagtttacgatgtgaggaagatgatcgctaagagcgaacaggagatcggcaaggccaccgctaagtatttcttctacagcaacatcatgaactttttcaagaccgagatcacacttgccaacggcgaaatcaggaagaggccgcttatcgagaccaacggtgagaccggcgagatcgtgtgggacaagggcagggacttcgccaccgtgaggaaagtcctgagcatgccccaggtgaatattgtgaaaaaaactgaggtgcagacaggcggctttagcaaggaatccatcctgcccaagaggaacagcgacaagctgatcgcccggaagaaggactgggaccctaagaagtatggaggcttcgacagccccaccgtagcctacagcgtgctggtggtcgcgaaggtagagaaggggaagagcaagaaactgaagagcgtgaaggagctgctcggcataaccatcatggagaggtccagctttgagaagaaccccattgactttttggaagccaagggctacaaagaggtcaaaaaggacctgatcatcaaactccccaagtactccctgtttgaattggagaacggcagaaagaggatgctggcgagcgctggggaactgcaaaagggcaacgaactggcgctgcccagcaagtacgtgaattttctgtacctggcgtcccactacgaaaagctgaaaggcagccccgaggacaacgagcagaagcagctgttcgtggagcagcacaagcattacctggacgagataatcgagcaaatcagcgagttcagcaagagggtgattctggccgacgcgaacctggataaggtcctcagcgcctacaacaagcaccgagacaaacccatcagggagcaggccgagaatatcatacacctgttcaccctgacaaatctgggcgcacctgcggcattcaaatacttcgataccaccatcgacaggaaaaggtacactagcactaaggaggtgctggatgccaccttgatccaccagtccattaccggcctgtatgagaccaggatcgacctgagccagcttggaggcgactctagggcggacccaaaaaagaaaaggaaggtggaattccaccacactggactagtggatccgagctcggtaccaagcttaagtttaaaccgctga

SEQ ID NO: 161 - protein, 1377 aa, synthetic construct
MDKKYSIGLDIGTNSVGWAVITDEYKVPSKKFKVLGNTDRHSIKKNLIGALLFDSGETAEATRLKRTARRRYTRRKNRICYLQEIFSNEMAKVDDSFFHRLEESFLVEEDKKHERHPIFGNIVDEVAYHEKYPTIYHLRKKLVDSTDKADLRLIYLALAHMIKFRGHFLIEGDLNPDNSDVDKLFIQLVQTYNQLFEENPINASGVDAKAILSARLSKSRRLENLIAQLPGEKKNGLFGNLIALSLGLTPNFKSNFDLAEDAKLQLSKDTYDDDLDNLLAQIGDQYADLFLAAKNLSDAILLSDILRVNTEITKAPLSASMIKRYDEHHQDLTLLKALVRQQLPEKYKEIFFDQSKNGYAGYIDGGASQEEFYKFIKPILEKMDGTEELLVKLNREDLLRKQRTFDNGSIPHQIHLGELHAILRRQEDFYPFLKDNREKIEKILTFRIPYYVGPLARGNSRFAWMTRKSEETITPWNFEEVVDKGASAQSFIERMTNFDKNLPNEKVLPKHSLLYEYFTVYNELTKVKYVTEGMRKPAFLSGEQKKAIVDLLFKTNRKVTVKQLKEDYFKKIECFDSVEISGVEDRFNASLGTYHDLLKIIKDKDFLDNEENEDILEDIVLTLTLFEDREMIEERLKTYAHLFDDKVMKQLKRRRYTGWGRLSRKLINGIRDKQSGKTILDFLKSDGFANRNFMQLIHDDSLTFKEDIQKAQVSGQGDSLHEHIANLAGSPAIKKGILQTVKVVDELVKVMGRHKPENIVIEMARENQTTQKGQKNSRERMKRIEEGIKELGSQILKEHPVENTQLQNEKLYLYYLQNGRDMYVDQELDINRLSDYDVDHIVPQSFLKDDSIDNKVLTRSDKNRGKSDNVPSEEVVKKMKNYWRQLLNAKLITQRKFDNLTKAERGGLSELDKAGFIKRQLVETRQITKHVAQILDSRMNTKYDENDKLIREVKVITLKSKLVSDFRKDFQFYKVREINNYHHAHDAYLNAVVGTALIKKYPKLESEFVYGDYKVYDVRKMIAKSEQEIGKATAKYFFYSNIMNFFKTEITLANGEIRKRPLIETNGETGEIVWDKGRDFATVRKVLSMPQVNIVKKTEVQTGGFSKESILPKRNSDKLIARKKDWDPKKYGGFDSPTVAYSVLVVAKVEKGKSKKLKSVKELLGITIMERSSFEKNPIDFLEAKGYKEVKKDLIIKLPKYSLFELENGRKRMLASAGELQKGNELALPSKYVNFLYLASHYEKLKGSPEDNEQKQLFVEQHKHYLDEIIEQISEFSKRVILADANLDKVLSAYNKHRDKPIREQAENIIHLFTLTNLGAPAAFKYFDTTIDRKRYTSTKEVLDATLIHQSITGLYETRIDLSQLGGDAAPKKKRKV

SEQ ID NO: 162 - protein, 1387 aa, synthetic construct
MDKKYSIGLDIGTNSVGWAVITDEYKVPSKKFKVLGNTDRHSIKKNLIGALLFDSGETAEATRLKRTARRRYTRRKNRICYLQEIFSNEMAKVDDSFFHRLEESFLVEEDKKHERHPIFGNIVDEVAYHEKYPTIYHLRKKLVDSTDKADLRLIYLALAHMIKFRGHFLIEGDLNPDNSDVDKLFIQLVQTYNQLFEENPINASGVDAKAILSARLSKSRRLENLIAQLPGEKKNGLFGNLIALSLGLTPNFKSNFDLAEDAKLQLSKDTYDDDLDNLLAQIGDQYADLFLAAKNLSDAILLSDILRVNTEITKAPLSASMIKRYDEHHQDLTLLKALVRQQLPEKYKEIFFDQSKNGYAGYIDGGASQEEFYKFIKPILEKMDGTEELLVKLNREDLLRKQRTFDNGSIPHQIHLGELHAILRRQEDFYPFLKDNREKIEKILTFRIPYYVGPLARGNSRFAWMTRKSEETITPWNFEEVVDKGASAQSFIERMTNFDKNLPNEKVLPKHSLLYEYFTVYNELTKVKYVTEGMRKPAFLSGEQKKAIVDLLFKTNRKVTVKQLKEDYFKKIECFDSVEISGVEDRFNASLGTYHDLLKIIKDKDFLDNEENEDILEDIVLTLTLFEDREMIEERLKTYAHLFDDKVMKQLKRRRYTGWGRLSRKLINGIRDKQSGKTILDFLKSDGFANRNFMQLIHDDSLTFKEDIQKAQVSGQGDSLHEHIANLAGSPAIKKGILQTVKVVDELVKVMGRHKPENIVIEMARENQTTQKGQKNSRERMKRIEEGIKELGSQILKEHPVENTQLQNEKLYLYYLQNGRDMYVDQELDINRLSDYDVDHIVPQSFLKDDSIDNKVLTRSDKNRGKSDNVPSEEVVKKMKNYWRQLLNAKLITQRKFDNLTKAERGGLSELDKAGFIKRQLVETRQITKHVAQILDSRMNTKYDENDKLIREVKVITLKSKLVSDFRKDFQFYKVREINNYHHAHDAYLNAVVGTALIKKYPKLESEFVYGDYKVYDVRKMIAKSEQEIGKATAKYFFYSNIMNFFKTEITLANGEIRKRPLIETNGETGEIVWDKGRDFATVRKVLSMPQVNIVKKTEVQTGGFSKESILPKRNSDKLIARKKDWDPKKYGGFDSPTVAYSVLVVAKVEKGKSKKLKSVKELLGITIMERSSFEKNPIDFLEAKGYKEVKKDLIIKLPKYSLFELENGRKRMLASAGELQKGNELALPSKYVNFLYLASHYEKLKGSPEDNEQKQLFVEQHKHYLDEIIEQISEFSKRVILADANLDKVLSAYNKHRDKPIREQAENIIHLFTLTNLGAPAAFKYFDTTIDRKRYTSTKEVLDATLIHQSITGLYETRIDLSQLGGDAAKRKNSATVHLCPVPRKR

SEQ ID NO: 163 - protein, 1389 aa, synthetic construct
MDKKYSIGLDIGTNSVGWAVITDEYKVPSKKFKVLGNTDRHSIKKNLIGALLFDSGETAEATRLKRTARRRYTRRKNRICYLQEIFSNEMAKVDDSFFHRLEESFLVEEDKKHERHPIFGNIVDEVAYHEKYPTIYHLRKKLVDSTDKADLRLIYLALAHMIKFRGHFLIEGDLNPDNSDVDKLFIQLVQTYNQLFEENPINASGVDAKAILSARLSKSRRLENLIAQLPGEKKNGLFGNLIALSLGLTPNFKSNFDLAEDAKLQLSKDTYDDDLDNLLAQIGDQYADLFLAAKNLSDAILLSDILRVNTEITKAPLSASMIKRYDEHHQDLTLLKALVRQQLPEKYKEIFFDQSKNGYAGYIDGGASQEEFYKFIKPILEKMDGTEELLVKLNREDLLRKQRTFDNGSIPHQIHLGELHAILRRQEDFYPFLKDNREKIEKILTFRIPYYVGPLARGNSRFAWMTRKSEETITPWNFEEVVDKGASAQSFIERMTNFDKNLPNEKVLPKHSLLYEYFTVYNELTKVKYVTEGMRKPAFLSGEQKKAIVDLLFKTNRKVTVKQLKEDYFKKIECFDSVEISGVEDRFNASLGTYHDLLKIIKDKDFLDNEENEDILEDIVLTLTLFEDREMIEERLKTYAHLFDDKVMKQLKRRRYTGWGRLSRKLINGIRDKQSGKTILDFLKSDGFANRNFMQLIHDDSLTFKEDIQKAQVSGQGDSLHEHIANLAGSPAIKKGILQTVKVVDELVKVMGRHKPENIVIEMARENQTTQKGQKNSRERMKRIEEGIKELGSQILKEHPVENTQLQNEKLYLYYLQNGRDMYVDQELDINRLSDYDVDHIVPQSFLKDDSIDNKVLTRSDKNRGKSDNVPSEEVVKKMKNYWRQLLNAKLITQRKFDNLTKAERGGLSELDKAGFIKRQLVETRQITKHVAQILDSRMNTKYDENDKLIREVKVITLKSKLVSDFRKDFQFYKVREINNYHHAHDAYLNAVVGTALIKKYPKLESEFVYGDYKVYDVRKMIAKSEQEIGKATAKYFFYSNIMNFFKTEITLANGEIRKRPLIETNGETGEIVWDKGRDFATVRKVLSMPQVNIVKKTEVQTGGFSKESILPKRNSDKLIARKKDWDPKKYGGFDSPTVAYSVLVVAKVEKGKSKKLKSVKELLGITIMERSSFEKNPIDFLEAKGYKEVKKDLIIKLPKYSLFELENGRKRMLASAGELQKGNELALPSKYVNFLYLASHYEKLKGSPEDNEQKQLFVEQHKHYLDEIIEQISEFSKRVILADANLDKVLSAYNKHRDKPIREQAENIIHLFTLTNLGAPAAFKYFDTTIDRKRYTSTKEVLDATLIHQSITGLYETRIDLSQLGGDAAKRPAELDGADNASQAAKRR

SEQ ID NO: 164 - protein, 1387 aa, synthetic construct
MDKKYSIGLDIGTNSVGWAVITDEYKVPSKKFKVLGNTDRHSIKKNLIGALLFDSGETAEATRLKRTARRRYTRRKNRICYLQEIFSNEMAKVDDSFFHRLEESFLVEEDKKHERHPIFGNIVDEVAYHEKYPTIYHLRKKLVDSTDKADLRLIYLALAHMIKFRGHFLIEGDLNPDNSDVDKLFIQLVQTYNQLFEENPINASGVDAKAILSARLSKSRRLENLIAQLPGEKKNGLFGNLIALSLGLTPNFKSNFDLAEDAKLQLSKDTYDDDLDNLLAQIGDQYADLFLAAKNLSDAILLSDILRVNTEITKAPLSASMIKRYDEHHQDLTLLKALVRQQLPEKYKEIFFDQSKNGYAGYIDGGASQEEFYKFIKPILEKMDGTEELLVKLNREDLLRKQRTFDNGSIPHQIHLGELHAILRRQEDFYPFLKDNREKIEKILTFRIPYYVGPLARGNSRFAWMTRKSEETITPWNFEEVVDKGASAQSFIERMTNFDKNLPNEKVLPKHSLLYEYFTVYNELTKVKYVTEGMRKPAFLSGEQKKAIVDLLFKTNRKVTVKQLKEDYFKKIECFDSVEISGVEDRFNASLGTYHDLLKIIKDKDFLDNEENEDILEDIVLTLTLFEDREMIEERLKTYAHLFDDKVMKQLKRRRYTGWGRLSRKLINGIRDKQSGKTILDFLKSDGFANRNFMQLIHDDSLTFKEDIQKAQVSGQGDSLHEHIANLAGSPAIKKGILQTVKVVDELVKVMGRHKPENIVIEMARENQTTQKGQKNSRERMKRIEEGIKELGSQILKEHPVENTQLQNEKLYLYYLQNGRDMYVDQELDINRLSDYDVDHIVPQSFLKDDSIDNKVLTRSDKNRGKSDNVPSEEVVKKMKNYWRQLLNAKLITQRKFDNLTKAERGGLSELDKAGFIKRQLVETRQITKHVAQILDSRMNTKYDENDKLIREVKVITLKSKLVSDFRKDFQFYKVREINNYHHAHDAYLNAVVGTALIKKYPKLESEFVYGDYKVYDVRKMIAKSEQEIGKATAKYFFYSNIMNFFKTEITLANGEIRKRPLIETNGETGEIVWDKGRDFATVRKVLSMPQVNIVKKTEVQTGGFSKESILPKRNSDKLIARKKDWDPKKYGGFDSPTVAYSVLVVAKVEKGKSKKLKSVKELLGITIMERSSFEKNPIDFLEAKGYKEVKKDLIIKLPKYSLFELENGRKRMLASAGELQKGNELALPSKYVNFLYLASHYEKLKGSPEDNEQKQLFVEQHKHYLDEIIEQISEFSKRVILADANLDKVLSAYNKHRDKPIREQAENIIHLFTLTNLGAPAAFKYFDTTIDRKRYTSTKEVLDATLIHQSITGLYETRIDLSQLGGDAARKRNSATVHLCPVPRKR

SEQ ID NO: 165 - protein, 1386 aa, synthetic construct
MDKKYSIGLDIGTNSVGWAVITDEYKVPSKKFKVLGNTDRHSIKKNLIGALLFDSGETAEATRLKRTARRRYTRRKNRICYLQEIFSNEMAKVDDSFFHRLEESFLVEEDKKHERHPIFGNIVDEVAYHEKYPTIYHLRKKLVDSTDKADLRLIYLALAHMIKFRGHFLIEGDLNPDNSDVDKLFIQLVQTYNQLFEENPINASGVDAKAILSARLSKSRRLENLIAQLPGEKKNGLFGNLIALSLGLTPNFKSNFDLAEDAKLQLSKDTYDDDLDNLLAQIGDQYADLFLAAKNLSDAILLSDILRVNTEITKAPLSASMIKRYDEHHQDLTLLKALVRQQLPEKYKEIFFDQSKNGYAGYIDGGASQEEFYKFIKPILEKMDGTEELLVKLNREDLLRKQRTFDNGSIPHQIHLGELHAILRRQEDFYPFLKDNREKIEKILTFRIPYYVGPLARGNSRFAWMTRKSEETITPWNFEEVVDKGASAQSFIERMTNFDKNLPNEKVLPKHSLLYEYFTVYNELTKVKYVTEGMRKPAFLSGEQKKAIVDLLFKTNRKVTVKQLKEDYFKKIECFDSVEISGVEDRFNASLGTYHDLLKIIKDKDFLDNEENEDILEDIVLTLTLFEDREMIEERLKTYAHLFDDKVMKQLKRRRYTGWGRLSRKLINGIRDKQSGKTILDFLKSDGFANRNFMQLIHDDSLTFKEDIQKAQVSGQGDSLHEHIANLAGSPAIKKGILQTVKVVDELVKVMGRHKPENIVIEMARENQTTQKGQKNSRERMKRIEEGIKELGSQILKEHPVENTQLQNEKLYLYYLQNGRDMYVDQELDINRLSDYDVDHIVPQSFLKDDSIDNKVLTRSDKNRGKSDNVPSEEVVKKMKNYWRQLLNAKLITQRKFDNLTKAERGGLSELDKAGFIKRQLVETRQITKHVAQILDSRMNTKYDENDKLIREVKVITLKSKLVSDFRKDFQFYKVREINNYHHAHDAYLNAVVGTALIKKYPKLESEFVYGDYKVYDVRKMIAKSEQEIGKATAKYFFYSNIMNFFKTEITLANGEIRKRPLIETNGETGEIVWDKGRDFATVRKVLSMPQVNIVKKTEVQTGGFSKESILPKRNSDKLIARKKDWDPKKYGGFDSPTVAYSVLVVAKVEKGKSKKLKSVKELLGITIMERSSFEKNPIDFLEAKGYKEVKKDLIIKLPKYSLFELENGRKRMLASAGELQKGNELALPSKYVNFLYLASHYEKLKGSPEDNEQKQLFVEQHKHYLDEIIEQISEFSKRVILADANLDKVLSAYNKHRDKPIREQAENIIHLFTLTNLGAPAAFKYFDTTIDRKRYTSTKEVLDATLIHQSITGLYETRIDLSQLGGDAAKRPATLANNSPAAKRR

SEQ ID NO: 166 - protein, 1386 aa, synthetic construct
MDKKYSIGLDIGTNSVGWAVITDEYKVPSKKFKVLGNTDRHSIKKNLIGALLFDSGETAEATRLKRTARRRYTRRKNRICYLQEIFSNEMAKVDDSFFHRLEESFLVEEDKKHERHPIFGNIVDEVAYHEKYPTIYHLRKKLVDSTDKADLRLIYLALAHMIKFRGHFLIEGDLNPDNSDVDKLFIQLVQTYNQLFEENPINASGVDAKAILSARLSKSRRLENLIAQLPGEKKNGLFGNLIALSLGLTPNFKSNFDLAEDAKLQLSKDTYDDDLDNLLAQIGDQYADLFLAAKNLSDAILLSDILRVNTEITKAPLSASMIKRYDEHHQDLTLLKALVRQQLPEKYKEIFFDQSKNGYAGYIDGGASQEEFYKFIKPILEKMDGTEELLVKLNREDLLRKQRTFDNGSIPHQIHLGELHAILRRQEDFYPFLKDNREKIEKILTFRIPYYVGPLARGNSRFAWMTRKSEETITPWNFEEVVDKGASAQSFIERMTNFDKNLPNEKVLPKHSLLYEYFTVYNELTKVKYVTEGMRKPAFLSGEQKKAIVDLLFKTNRKVTVKQLKEDYFKKIECFDSVEISGVEDRFNASLGTYHDLLKIIKDKDFLDNEENEDILEDIVLTLTLFEDREMIEERLKTYAHLFDDKVMKQLKRRRYTGWGRLSRKLINGIRDKQSGKTILDFLKSDGFANRNFMQLIHDDSLTFKEDIQKAQVSGQGDSLHEHIANLAGSPAIKKGILQTVKVVDELVKVMGRHKPENIVIEMARENQTTQKGQKNSRERMKRIEEGIKELGSQILKEHPVENTQLQNEKLYLYYLQNGRDMYVDQELDINRLSDYDVDHIVPQSFLKDDSIDNKVLTRSDKNRGKSDNVPSEEVVKKMKNYWRQLLNAKLITQRKFDNLTKAERGGLSELDKAGFIKRQLVETRQITKHVAQILDSRMNTKYDENDKLIREVKVITLKSKLVSDFRKDFQFYKVREINNYHHAHDAYLNAVVGTALIKKYPKLESEFVYGDYKVYDVRKMIAKSEQEIGKATAKYFFYSNIMNFFKTEITLANGEIRKRPLIETNGETGEIVWDKGRDFATVRKVLSMPQVNIVKKTEVQTGGFSKESILPKRNSDKLIARKKDWDPKKYGGFDSPTVAYSVLVVAKVEKGKSKKLKSVKELLGITIMERSSFEKNPIDFLEAKGYKEVKKDLIIKLPKYSLFELENGRKRMLASAGELQKGNELALPSKYVNFLYLASHYEKLKGSPEDNEQKQLFVEQHKHYLDEIIEQISEFSKRVILADANLDKVLSAYNKHRDKPIREQAENIIHLFTLTNLGAPAAFKYFDTTIDRKRYTSTKEVLDATLIHQSITGLYETRIDLSQLGGDAAKRPATLANESPAAKRR

SEQ ID NO: 167 - protein, 1387 aa, synthetic construct
MDKKYSIGLDIGTNSVGWAVITDEYKVPSKKFKVLGNTDRHSIKKNLIGALLFDSGETAEATRLKRTARRRYTRRKNRICYLQEIFSNEMAKVDDSFFHRLEESFLVEEDKKHERHPIFGNIVDEVAYHEKYPTIYHLRKKLVDSTDKADLRLIYLALAHMIKFRGHFLIEGDLNPDNSDVDKLFIQLVQTYNQLFEENPINASGVDAKAILSARLSKSRRLENLIAQLPGEKKNGLFGNLIALSLGLTPNFKSNFDLAEDAKLQLSKDTYDDDLDNLLAQIGDQYADLFLAAKNLSDAILLSDILRVNTEITKAPLSASMIKRYDEHHQDLTLLKALVRQQLPEKYKEIFFDQSKNGYAGYIDGGASQEEFYKFIKPILEKMDGTEELLVKLNREDLLRKQRTFDNGSIPHQIHLGELHAILRRQEDFYPFLKDNREKIEKILTFRIPYYVGPLARGNSRFAWMTRKSEETITPWNFEEVVDKGASAQSFIERMTNFDKNLPNEKVLPKHSLLYEYFTVYNELTKVKYVTEGMRKPAFLSGEQKKAIVDLLFKTNRKVTVKQLKEDYFKKIECFDSVEISGVEDRFNASLGTYHDLLKIIKDKDFLDNEENEDILEDIVLTLTLFEDREMIEERLKTYAHLFDDKVMKQLKRRRYTGWGRLSRKLINGIRDKQSGKTILDFLKSDGFANRNFMQLIHDDSLTFKEDIQKAQVSGQGDSLHEHIANLAGSPAIKKGILQTVKVVDELVKVMGRHKPENIVIEMARENQTTQKGQKNSRERMKRIEEGIKELGSQILKEHPVENTQLQNEKLYLYYLQNGRDMYVDQELDINRLSDYDVDHIVPQSFLKDDSIDNKVLTRSDKNRGKSDNVPSEEVVKKMKNYWRQLLNAKLITQRKFDNLTKAERGGLSELDKAGFIKRQLVETRQITKHVAQILDSRMNTKYDENDKLIREVKVITLKSKLVSDFRKDFQFYKVREINNYHHAHDAYLNAVVGTALIKKYPKLESEFVYGDYKVYDVRKMIAKSEQEIGKATAKYFFYSNIMNFFKTEITLANGEIRKRPLIETNGETGEIVWDKGRDFATVRKVLSMPQVNIVKKTEVQTGGFSKESILPKRNSDKLIARKKDWDPKKYGGFDSPTVAYSVLVVAKVEKGKSKKLKSVKELLGITIMERSSFEKNPIDFLEAKGYKEVKKDLIIKLPKYSLFELENGRKRMLASAGELQKGNELALPSKYVNFLYLASHYEKLKGSPEDNEQKQLFVEQHKHYLDEIIEQISEFSKRVILADANLDKVLSAYNKHRDKPIREQAENIIHLFTLTNLGAPAAFKYFDTTIDRKRYTSTKEVLDATLIHQSITGLYETRIDLSQLGGDAARRRNSATVHLCPVPRKR

SEQ ID NO: 168 - protein, 1382 aa, synthetic construct
MDKKYSIGLDIGTNSVGWAVITDEYKVPSKKFKVLGNTDRHSIKKNLIGALLFDSGETAEATRLKRTARRRYTRRKNRICYLQEIFSNEMAKVDDSFFHRLEESFLVEEDKKHERHPIFGNIVDEVAYHEKYPTIYHLRKKLVDSTDKADLRLIYLALAHMIKFRGHFLIEGDLNPDNSDVDKLFIQLVQTYNQLFEENPINASGVDAKAILSARLSKSRRLENLIAQLPGEKKNGLFGNLIALSLGLTPNFKSNFDLAEDAKLQLSKDTYDDDLDNLLAQIGDQYADLFLAAKNLSDAILLSDILRVNTEITKAPLSASMIKRYDEHHQDLTLLKALVRQQLPEKYKEIFFDQSKNGYAGYIDGGASQEEFYKFIKPILEKMDGTEELLVKLNREDLLRKQRTFDNGSIPHQIHLGELHAILRRQEDFYPFLKDNREKIEKILTFRIPYYVGPLARGNSRFAWMTRKSEETITPWNFEEVVDKGASAQSFIERMTNFDKNLPNEKVLPKHSLLYEYFTVYNELTKVKYVTEGMRKPAFLSGEQKKAIVDLLFKTNRKVTVKQLKEDYFKKIECFDSVEISGVEDRFNASLGTYHDLLKIIKDKDFLDNEENEDILEDIVLTLTLFEDREMIEERLKTYAHLFDDKVMKQLKRRRYTGWGRLSRKLINGIRDKQSGKTILDFLKSDGFANRNFMQLIHDDSLTFKEDIQKAQVSGQGDSLHEHIANLAGSPAIKKGILQTVKVVDELVKVMGRHKPENIVIEMARENQTTQKGQKNSRERMKRIEEGIKELGSQILKEHPVENTQLQNEKLYLYYLQNGRDMYVDQELDINRLSDYDVDHIVPQSFLKDDSIDNKVLTRSDKNRGKSDNVPSEEVVKKMKNYWRQLLNAKLITQRKFDNLTKAERGGLSELDKAGFIKRQLVETRQITKHVAQILDSRMNTKYDENDKLIREVKVITLKSKLVSDFRKDFQFYKVREINNYHHAHDAYLNAVVGTALIKKYPKLESEFVYGDYKVYDVRKMIAKSEQEIGKATAKYFFYSNIMNFFKTEITLANGEIRKRPLIETNGETGEIVWDKGRDFATVRKVLSMPQVNIVKKTEVQTGGFSKESILPKRNSDKLIARKKDWDPKKYGGFDSPTVAYSVLVVAKVEKGKSKKLKSVKELLGITIMERSSFEKNPIDFLEAKGYKEVKKDLIIKLPKYSLFELENGRKRMLASAGELQKGNELALPSKYVNFLYLASHYEKLKGSPEDNEQKQLFVEQHKHYLDEIIEQISEFSKRVILADANLDKVLSAYNKHRDKPIREQAENIIHLFTLTNLGAPAAFKYFDTTIDRKRYTSTKEVLDATLIHQSITGLYETRIDLSQLGGDAADTRLGKRKRRPW

SEQ ID NO: 169 - protein, 1384 aa, synthetic construct
MDKKYSIGLDIGTNSVGWAVITDEYKVPSKKFKVLGNTDRHSIKKNLIGALLFDSGETAEATRLKRTARRRYTRRKNRICYLQEIFSNEMAKVDDSFFHRLEESFLVEEDKKHERHPIFGNIVDEVAYHEKYPTIYHLRKKLVDSTDKADLRLIYLALAHMIKFRGHFLIEGDLNPDNSDVDKLFIQLVQTYNQLFEENPINASGVDAKAILSARLSKSRRLENLIAQLPGEKKNGLFGNLIALSLGLTPNFKSNFDLAEDAKLQLSKDTYDDDLDNLLAQIGDQYADLFLAAKNLSDAILLSDILRVNTEITKAPLSASMIKRYDEHHQDLTLLKALVRQQLPEKYKEIFFDQSKNGYAGYIDGGASQEEFYKFIKPILEKMDGTEELLVKLNREDLLRKQRTFDNGSIPHQIHLGELHAILRRQEDFYPFLKDNREKIEKILTFRIPYYVGPLARGNSRFAWMTRKSEETITPWNFEEVVDKGASAQSFIERMTNFDKNLPNEKVLPKHSLLYEYFTVYNELTKVKYVTEGMRKPAFLSGEQKKAIVDLLFKTNRKVTVKQLKEDYFKKIECFDSVEISGVEDRFNASLGTYHDLLKIIKDKDFLDNEENEDILEDIVLTLTLFEDREMIEERLKTYAHLFDDKVMKQLKRRRYTGWGRLSRKLINGIRDKQSGKTILDFLKSDGFANRNFMQLIHDDSLTFKEDIQKAQVSGQGDSLHEHIANLAGSPAIKKGILQTVKVVDELVKVMGRHKPENIVIEMARENQTTQKGQKNSRERMKRIEEGIKELGSQILKEHPVENTQLQNEKLYLYYLQNGRDMYVDQELDINRLSDYDVDHIVPQSFLKDDSIDNKVLTRSDKNRGKSDNVPSEEVVKKMKNYWRQLLNAKLITQRKFDNLTKAERGGLSELDKAGFIKRQLVETRQITKHVAQILDSRMNTKYDENDKLIREVKVITLKSKLVSDFRKDFQFYKVREINNYHHAHDAYLNAVVGTALIKKYPKLESEFVYGDYKVYDVRKMIAKSEQEIGKATAKYFFYSNIMNFFKTEITLANGEIRKRPLIETNGETGEIVWDKGRDFATVRKVLSMPQVNIVKKTEVQTGGFSKESILPKRNSDKLIARKKDWDPKKYGGFDSPTVAYSVLVVAKVEKGKSKKLKSVKELLGITIMERSSFEKNPIDFLEAKGYKEVKKDLIIKLPKYSLFELENGRKRMLASAGELQKGNELALPSKYVNFLYLASHYEKLKGSPEDNEQKQLFVEQHKHYLDEIIEQISEFSKRVILADANLDKVLSAYNKHRDKPIREQAENIIHLFTLTNLGAPAAFKYFDTTIDRKRYTSTKEVLDATLIHQSITGLYETRIDLSQLGGDAARRRSVLKRSWSVAF

SEQ ID NO: 170 - protein, 1386 aa, synthetic construct
MDKKYSIGLDIGTNSVGWAVITDEYKVPSKKFKVLGNTDRHSIKKNLIGALLFDSGETAEATRLKRTARRRYTRRKNRICYLQEIFSNEMAKVDDSFFHRLEESFLVEEDKKHERHPIFGNIVDEVAYHEKYPTIYHLRKKLVDSTDKADLRLIYLALAHMIKFRGHFLIEGDLNPDNSDVDKLFIQLVQTYNQLFEENPINASGVDAKAILSARLSKSRRLENLIAQLPGEKKNGLFGNLIALSLGLTPNFKSNFDLAEDAKLQLSKDTYDDDLDNLLAQIGDQYADLFLAAKNLSDAILLSDILRVNTEITKAPLSASMIKRYDEHHQDLTLLKALVRQQLPEKYKEIFFDQSKNGYAGYIDGGASQEEFYKFIKPILEKMDGTEELLVKLNREDLLRKQRTFDNGSIPHQIHLGELHAILRRQEDFYPFLKDNREKIEKILTFRIPYYVGPLARGNSRFAWMTRKSEETITPWNFEEVVDKGASAQSFIERMTNFDKNLPNEKVLPKHSLLYEYFTVYNELTKVKYVTEGMRKPAFLSGEQKKAIVDLLFKTNRKVTVKQLKEDYFKKIECFDSVEISGVEDRFNASLGTYHDLLKIIKDKDFLDNEENEDILEDIVLTLTLFEDREMIEERLKTYAHLFDDKVMKQLKRRRYTGWGRLSRKLINGIRDKQSGKTILDFLKSDGFANRNFMQLIHDDSLTFKEDIQKAQVSGQGDSLHEHIANLAGSPAIKKGILQTVKVVDELVKVMGRHKPENIVIEMARENQTTQKGQKNSRERMKRIEEGIKELGSQILKEHPVENTQLQNEKLYLYYLQNGRDMYVDQELDINRLSDYDVDHIVPQSFLKDDSIDNKVLTRSDKNRGKSDNVPSEEVVKKMKNYWRQLLNAKLITQRKFDNLTKAERGGLSELDKAGFIKRQLVETRQITKHVAQILDSRMNTKYDENDKLIREVKVITLKSKLVSDFRKDFQFYKVREINNYHHAHDAYLNAVVGTALIKKYPKLESEFVYGDYKVYDVRKMIAKSEQEIGKATAKYFFYSNIMNFFKTEITLANGEIRKRPLIETNGETGEIVWDKGRDFATVRKVLSMPQVNIVKKTEVQTGGFSKESILPKRNSDKLIARKKDWDPKKYGGFDSPTVAYSVLVVAKVEKGKSKKLKSVKELLGITIMERSSFEKNPIDFLEAKGYKEVKKDLIIKLPKYSLFELENGRKRMLASAGELQKGNELALPSKYVNFLYLASHYEKLKGSPEDNEQKQLFVEQHKHYLDEIIEQISEFSKRVILADANLDKVLSAYNKHRDKPIREQAENIIHLFTLTNLGAPAAFKYFDTTIDRKRYTSTKEVLDATLIHQSITGLYETRIDLSQLGGDAAKRPATLANDSPAAKRR

SEQ ID NO: 171 - protein, 1389 aa, synthetic construct
MDKKYSIGLDIGTNSVGWAVITDEYKVPSKKFKVLGNTDRHSIKKNLIGALLFDSGETAEATRLKRTARRRYTRRKNRICYLQEIFSNEMAKVDDSFFHRLEESFLVEEDKKHERHPIFGNIVDEVAYHEKYPTIYHLRKKLVDSTDKADLRLIYLALAHMIKFRGHFLIEGDLNPDNSDVDKLFIQLVQTYNQLFEENPINASGVDAKAILSARLSKSRRLENLIAQLPGEKKNGLFGNLIALSLGLTPNFKSNFDLAEDAKLQLSKDTYDDDLDNLLAQIGDQYADLFLAAKNLSDAILLSDILRVNTEITKAPLSASMIKRYDEHHQDLTLLKALVRQQLPEKYKEIFFDQSKNGYAGYIDGGASQEEFYKFIKPILEKMDGTEELLVKLNREDLLRKQRTFDNGSIPHQIHLGELHAILRRQEDFYPFLKDNREKIEKILTFRIPYYVGPLARGNSRFAWMTRKSEETITPWNFEEVVDKGASAQSFIERMTNFDKNLPNEKVLPKHSLLYEYFTVYNELTKVKYVTEGMRKPAFLSGEQKKAIVDLLFKTNRKVTVKQLKEDYFKKIECFDSVEISGVEDRFNASLGTYHDLLKIIKDKDFLDNEENEDILEDIVLTLTLFEDREMIEERLKTYAHLFDDKVMKQLKRRRYTGWGRLSRKLINGIRDKQSGKTILDFLKSDGFANRNFMQLIHDDSLTFKEDIQKAQVSGQGDSLHEHIANLAGSPAIKKGILQTVKVVDELVKVMGRHKPENIVIEMARENQTTQKGQKNSRERMKRIEEGIKELGSQILKEHPVENTQLQNEKLYLYYLQNGRDMYVDQELDINRLSDYDVDHIVPQSFLKDDSIDNKVLTRSDKNRGKSDNVPSEEVVKKMKNYWRQLLNAKLITQRKFDNLTKAERGGLSELDKAGFIKRQLVETRQITKHVAQILDSRMNTKYDENDKLIREVKVITLKSKLVSDFRKDFQFYKVREINNYHHAHDAYLNAVVGTALIKKYPKLESEFVYGDYKVYDVRKMIAKSEQEIGKATAKYFFYSNIMNFFKTEITLANGEIRKRPLIETNGETGEIVWDKGRDFATVRKVLSMPQVNIVKKTEVQTGGFSKESILPKRNSDKLIARKKDWDPKKYGGFDSPTVAYSVLVVAKVEKGKSKKLKSVKELLGITIMERSSFEKNPIDFLEAKGYKEVKKDLIIKLPKYSLFELENGRKRMLASAGELQKGNELALPSKYVNFLYLASHYEKLKGSPEDNEQKQLFVEQHKHYLDEIIEQISEFSKRVILADANLDKVLSAYNKHRDKPIREQAENIIHLFTLTNLGAPAAFKYFDTTIDRKRYTSTKEVLDATLIHQSITGLYETRIDLSQLGGDAAKRPAALAGAGNASQAAKRR

SEQ ID NO: 172 - protein, 1389 aa, synthetic construct
MDKKYSIGLDIGTNSVGWAVITDEYKVPSKKFKVLGNTDRHSIKKNLIGALLFDSGETAEATRLKRTARRRYTRRKNRICYLQEIFSNEMAKVDDSFFHRLEESFLVEEDKKHERHPIFGNIVDEVAYHEKYPTIYHLRKKLVDSTDKADLRLIYLALAHMIKFRGHFLIEGDLNPDNSDVDKLFIQLVQTYNQLFEENPINASGVDAKAILSARLSKSRRLENLIAQLPGEKKNGLFGNLIALSLGLTPNFKSNFDLAEDAKLQLSKDTYDDDLDNLLAQIGDQYADLFLAAKNLSDAILLSDILRVNTEITKAPLSASMIKRYDEHHQDLTLLKALVRQQLPEKYKEIFFDQSKNGYAGYIDGGASQEEFYKFIKPILEKMDGTEELLVKLNREDLLRKQRTFDNGSIPHQIHLGELHAILRRQEDFYPFLKDNREKIEKILTFRIPYYVGPLARGNSRFAWMTRKSEETITPWNFEEVVDKGASAQSFIERMTNFDKNLPNEKVLPKHSLLYEYFTVYNELTKVKYVTEGMRKPAFLSGEQKKAIVDLLFKTNRKVTVKQLKEDYFKKIECFDSVEISGVEDRFNASLGTYHDLLKIIKDKDFLDNEENEDILEDIVLTLTLFEDREMIEERLKTYAHLFDDKVMKQLKRRRYTGWGRLSRKLINGIRDKQSGKTILDFLKSDGFANRNFMQLIHDDSLTFKEDIQKAQVSGQGDSLHEHIANLAGSPAIKKGILQTVKVVDELVKVMGRHKPENIVIEMARENQTTQKGQKNSRERMKRIEEGIKELGSQILKEHPVENTQLQNEKLYLYYLQNGRDMYVDQELDINRLSDYDVDHIVPQSFLKDDSIDNKVLTRSDKNRGKSDNVPSEEVVKKMKNYWRQLLNAKLITQRKFDNLTKAERGGLSELDKAGFIKRQLVETRQITKHVAQILDSRMNTKYDENDKLIREVKVITLKSKLVSDFRKDFQFYKVREINNYHHAHDAYLNAVVGTALIKKYPKLESEFVYGDYKVYDVRKMIAKSEQEIGKATAKYFFYSNIMNFFKTEITLANGEIRKRPLIETNGETGEIVWDKGRDFATVRKVLSMPQVNIVKKTEVQTGGFSKESILPKRNSDKLIARKKDWDPKKYGGFDSPTVAYSVLVVAKVEKGKSKKLKSVKELLGITIMERSSFEKNPIDFLEAKGYKEVKKDLIIKLPKYSLFELENGRKRMLASAGELQKGNELALPSKYVNFLYLASHYEKLKGSPEDNEQKQLFVEQHKHYLDEIIEQISEFSKRVILADANLDKVLSAYNKHRDKPIREQAENIIHLFTLTNLGAPAAFKYFDTTIDRKRYTSTKEVLDATLIHQSITGLYETRIDLSQLGGDAAKRPAELDEADNASQAAKRR

SEQ ID NO: 173 - protein, 1382 aa, synthetic construct
MDKKYSIGLDIGTNSVGWAVITDEYKVPSKKFKVLGNTDRHSIKKNLIGALLFDSGETAEATRLKRTARRRYTRRKNRICYLQEIFSNEMAKVDDSFFHRLEESFLVEEDKKHERHPIFGNIVDEVAYHEKYPTIYHLRKKLVDSTDKADLRLIYLALAHMIKFRGHFLIEGDLNPDNSDVDKLFIQLVQTYNQLFEENPINASGVDAKAILSARLSKSRRLENLIAQLPGEKKNGLFGNLIALSLGLTPNFKSNFDLAEDAKLQLSKDTYDDDLDNLLAQIGDQYADLFLAAKNLSDAILLSDILRVNTEITKAPLSASMIKRYDEHHQDLTLLKALVRQQLPEKYKEIFFDQSKNGYAGYIDGGASQEEFYKFIKPILEKMDGTEELLVKLNREDLLRKQRTFDNGSIPHQIHLGELHAILRRQEDFYPFLKDNREKIEKILTFRIPYYVGPLARGNSRFAWMTRKSEETITPWNFEEVVDKGASAQSFIERMTNFDKNLPNEKVLPKHSLLYEYFTVYNELTKVKYVTEGMRKPAFLSGEQKKAIVDLLFKTNRKVTVKQLKEDYFKKIECFDSVEISGVEDRFNASLGTYHDLLKIIKDKDFLDNEENEDILEDIVLTLTLFEDREMIEERLKTYAHLFDDKVMKQLKRRRYTGWGRLSRKLINGIRDKQSGKTILDFLKSDGFANRNFMQLIHDDSLTFKEDIQKAQVSGQGDSLHEHIANLAGSPAIKKGILQTVKVVDELVKVMGRHKPENIVIEMARENQTTQKGQKNSRERMKRIEEGIKELGSQILKEHPVENTQLQNEKLYLYYLQNGRDMYVDQELDINRLSDYDVDHIVPQSFLKDDSIDNKVLTRSDKNRGKSDNVPSEEVVKKMKNYWRQLLNAKLITQRKFDNLTKAERGGLSELDKAGFIKRQLVETRQITKHVAQILDSRMNTKYDENDKLIREVKVITLKSKLVSDFRKDFQFYKVREINNYHHAHDAYLNAVVGTALIKKYPKLESEFVYGDYKVYDVRKMIAKSEQEIGKATAKYFFYSNIMNFFKTEITLANGEIRKRPLIETNGETGEIVWDKGRDFATVRKVLSMPQVNIVKKTEVQTGGFSKESILPKRNSDKLIARKKDWDPKKYGGFDSPTVAYSVLVVAKVEKGKSKKLKSVKELLGITIMERSSFEKNPIDFLEAKGYKEVKKDLIIKLPKYSLFELENGRKRMLASAGELQKGNELALPSKYVNFLYLASHYEKLKGSPEDNEQKQLFVEQHKHYLDEIIEQISEFSKRVILADANLDKVLSAYNKHRDKPIREQAENIIHLFTLTNLGAPAAFKYFDTTIDRKRYTSTKEVLDATLIHQSITGLYETRIDLSQLGGDAARRRKRRREWEDF

SEQ ID NO: 174 - protein, 1382 aa, synthetic construct
MDKKYSIGLDIGTNSVGWAVITDEYKVPSKKFKVLGNTDRHSIKKNLIGALLFDSGETAEATRLKRTARRRYTRRKNRICYLQEIFSNEMAKVDDSFFHRLEESFLVEEDKKHERHPIFGNIVDEVAYHEKYPTIYHLRKKLVDSTDKADLRLIYLALAHMIKFRGHFLIEGDLNPDNSDVDKLFIQLVQTYNQLFEENPINASGVDAKAILSARLSKSRRLENLIAQLPGEKKNGLFGNLIALSLGLTPNFKSNFDLAEDAKLQLSKDTYDDDLDNLLAQIGDQYADLFLAAKNLSDAILLSDILRVNTEITKAPLSASMIKRYDEHHQDLTLLKALVRQQLPEKYKEIFFDQSKNGYAGYIDGGASQEEFYKFIKPILEKMDGTEELLVKLNREDLLRKQRTFDNGSIPHQIHLGELHAILRRQEDFYPFLKDNREKIEKILTFRIPYYVGPLARGNSRFAWMTRKSEETITPWNFEEVVDKGASAQSFIERMTNFDKNLPNEKVLPKHSLLYEYFTVYNELTKVKYVTEGMRKPAFLSGEQKKAIVDLLFKTNRKVTVKQLKEDYFKKIECFDSVEISGVEDRFNASLGTYHDLLKIIKDKDFLDNEENEDILEDIVLTLTLFEDREMIEERLKTYAHLFDDKVMKQLKRRRYTGWGRLSRKLINGIRDKQSGKTILDFLKSDGFANRNFMQLIHDDSLTFKEDIQKAQVSGQGDSLHEHIANLAGSPAIKKGILQTVKVVDELVKVMGRHKPENIVIEMARENQTTQKGQKNSRERMKRIEEGIKELGSQILKEHPVENTQLQNEKLYLYYLQNGRDMYVDQELDINRLSDYDVDHIVPQSFLKDDSIDNKVLTRSDKNRGKSDNVPSEEVVKKMKNYWRQLLNAKLITQRKFDNLTKAERGGLSELDKAGFIKRQLVETRQITKHVAQILDSRMNTKYDENDKLIREVKVITLKSKLVSDFRKDFQFYKVREINNYHHAHDAYLNAVVGTALIKKYPKLESEFVYGDYKVYDVRKMIAKSEQEIGKATAKYFFYSNIMNFFKTEITLANGEIRKRPLIETNGETGEIVWDKGRDFATVRKVLSMPQVNIVKKTEVQTGGFSKESILPKRNSDKLIARKKDWDPKKYGGFDSPTVAYSVLVVAKVEKGKSKKLKSVKELLGITIMERSSFEKNPIDFLEAKGYKEVKKDLIIKLPKYSLFELENGRKRMLASAGELQKGNELALPSKYVNFLYLASHYEKLKGSPEDNEQKQLFVEQHKHYLDEIIEQISEFSKRVILADANLDKVLSAYNKHRDKPIREQAENIIHLFTLTNLGAPAAFKYFDTTIDRKRYTSTKEVLDATLIHQSITGLYETRIDLSQLGGDAATSPSRKRKWDQV

SEQ ID NO: 175 - protein, 1390 aa, synthetic construct
MDKKYSIGLDIGTNSVGWAVITDEYKVPSKKFKVLGNTDRHSIKKNLIGALLFDSGETAEATRLKRTARRRYTRRKNRICYLQEIFSNEMAKVDDSFFHRLEESFLVEEDKKHERHPIFGNIVDEVAYHEKYPTIYHLRKKLVDSTDKADLRLIYLALAHMIKFRGHFLIEGDLNPDNSDVDKLFIQLVQTYNQLFEENPINASGVDAKAILSARLSKSRRLENLIAQLPGEKKNGLFGNLIALSLGLTPNFKSNFDLAEDAKLQLSKDTYDDDLDNLLAQIGDQYADLFLAAKNLSDAILLSDILRVNTEITKAPLSASMIKRYDEHHQDLTLLKALVRQQLPEKYKEIFFDQSKNGYAGYIDGGASQEEFYKFIKPILEKMDGTEELLVKLNREDLLRKQRTFDNGSIPHQIHLGELHAILRRQEDFYPFLKDNREKIEKILTFRIPYYVGPLARGNSRFAWMTRKSEETITPWNFEEVVDKGASAQSFIERMTNFDKNLPNEKVLPKHSLLYEYFTVYNELTKVKYVTEGMRKPAFLSGEQKKAIVDLLFKTNRKVTVKQLKEDYFKKIECFDSVEISGVEDRFNASLGTYHDLLKIIKDKDFLDNEENEDILEDIVLTLTLFEDREMIEERLKTYAHLFDDKVMKQLKRRRYTGWGRLSRKLINGIRDKQSGKTILDFLKSDGFANRNFMQLIHDDSLTFKEDIQKAQVSGQGDSLHEHIANLAGSPAIKKGILQTVKVVDELVKVMGRHKPENIVIEMARENQTTQKGQKNSRERMKRIEEGIKELGSQILKEHPVENTQLQNEKLYLYYLQNGRDMYVDQELDINRLSDYDVDHIVPQSFLKDDSIDNKVLTRSDKNRGKSDNVPSEEVVKKMKNYWRQLLNAKLITQRKFDNLTKAERGGLSELDKAGFIKRQLVETRQITKHVAQILDSRMNTKYDENDKLIREVKVITLKSKLVSDFRKDFQFYKVREINNYHHAHDAYLNAVVGTALIKKYPKLESEFVYGDYKVYDVRKMIAKSEQEIGKATAKYFFYSNIMNFFKTEITLANGEIRKRPLIETNGETGEIVWDKGRDFATVRKVLSMPQVNIVKKTEVQTGGFSKESILPKRNSDKLIARKKDWDPKKYGGFDSPTVAYSVLVVAKVEKGKSKKLKSVKELLGITIMERSSFEKNPIDFLEAKGYKEVKKDLIIKLPKYSLFELENGRKRMLASAGELQKGNELALPSKYVNFLYLASHYEKLKGSPEDNEQKQLFVEQHKHYLDEIIEQISEFSKRVILADANLDKVLSAYNKHRDKPIREQAENIIHLFTLTNLGAPAAFKYFDTTIDRKRYTSTKEVLDATLIHQSITGLYETRIDLSQLGGDAAAVKRPAATKKAGQAKKKKLD

SEQ ID NO: 176 - protein, 1382 aa, synthetic construct
MDKKYSIGLDIGTNSVGWAVITDEYKVPSKKFKVLGNTDRHSIKKNLIGALLFDSGETAEATRLKRTARRRYTRRKNRICYLQEIFSNEMAKVDDSFFHRLEESFLVEEDKKHERHPIFGNIVDEVAYHEKYPTIYHLRKKLVDSTDKADLRLIYLALAHMIKFRGHFLIEGDLNPDNSDVDKLFIQLVQTYNQLFEENPINASGVDAKAILSARLSKSRRLENLIAQLPGEKKNGLFGNLIALSLGLTPNFKSNFDLAEDAKLQLSKDTYDDDLDNLLAQIGDQYADLFLAAKNLSDAILLSDILRVNTEITKAPLSASMIKRYDEHHQDLTLLKALVRQQLPEKYKEIFFDQSKNGYAGYIDGGASQEEFYKFIKPILEKMDGTEELLVKLNREDLLRKQRTFDNGSIPHQIHLGELHAILRRQEDFYPFLKDNREKIEKILTFRIPYYVGPLARGNSRFAWMTRKSEETITPWNFEEVVDKGASAQSFIERMTNFDKNLPNEKVLPKHSLLYEYFTVYNELTKVKYVTEGMRKPAFLSGEQKKAIVDLLFKTNRKVTVKQLKEDYFKKIECFDSVEISGVEDRFNASLGTYHDLLKIIKDKDFLDNEENEDILEDIVLTLTLFEDREMIEERLKTYAHLFDDKVMKQLKRRRYTGWGRLSRKLINGIRDKQSGKTILDFLKSDGFANRNFMQLIHDDSLTFKEDIQKAQVSGQGDSLHEHIANLAGSPAIKKGILQTVKVVDELVKVMGRHKPENIVIEMARENQTTQKGQKNSRERMKRIEEGIKELGSQILKEHPVENTQLQNEKLYLYYLQNGRDMYVDQELDINRLSDYDVDHIVPQSFLKDDSIDNKVLTRSDKNRGKSDNVPSEEVVKKMKNYWRQLLNAKLITQRKFDNLTKAERGGLSELDKAGFIKRQLVETRQITKHVAQILDSRMNTKYDENDKLIREVKVITLKSKLVSDFRKDFQFYKVREINNYHHAHDAYLNAVVGTALIKKYPKLESEFVYGDYKVYDVRKMIAKSEQEIGKATAKYFFYSNIMNFFKTEITLANGEIRKRPLIETNGETGEIVWDKGRDFATVRKVLSMPQVNIVKKTEVQTGGFSKESILPKRNSDKLIARKKDWDPKKYGGFDSPTVAYSVLVVAKVEKGKSKKLKSVKELLGITIMERSSFEKNPIDFLEAKGYKEVKKDLIIKLPKYSLFELENGRKRMLASAGELQKGNELALPSKYVNFLYLASHYEKLKGSPEDNEQKQLFVEQHKHYLDEIIEQISEFSKRVILADANLDKVLSAYNKHRDKPIREQAENIIHLFTLTNLGAPAAFKYFDTTIDRKRYTSTKEVLDATLIHQSITGLYETRIDLSQLGGDAAPILGKRKRHLFL

SEQ ID NO: 177 - protein, 1379 aa, synthetic construct
MDKKYSIGLDIGTNSVGWAVITDEYKVPSKKFKVLGNTDRHSIKKNLIGALLFDSGETAEATRLKRTARRRYTRRKNRICYLQEIFSNEMAKVDDSFFHRLEESFLVEEDKKHERHPIFGNIVDEVAYHEKYPTIYHLRKKLVDSTDKADLRLIYLALAHMIKFRGHFLIEGDLNPDNSDVDKLFIQLVQTYNQLFEENPINASGVDAKAILSARLSKSRRLENLIAQLPGEKKNGLFGNLIALSLGLTPNFKSNFDLAEDAKLQLSKDTYDDDLDNLLAQIGDQYADLFLAAKNLSDAILLSDILRVNTEITKAPLSASMIKRYDEHHQDLTLLKALVRQQLPEKYKEIFFDQSKNGYAGYIDGGASQEEFYKFIKPILEKMDGTEELLVKLNREDLLRKQRTFDNGSIPHQIHLGELHAILRRQEDFYPFLKDNREKIEKILTFRIPYYVGPLARGNSRFAWMTRKSEETITPWNFEEVVDKGASAQSFIERMTNFDKNLPNEKVLPKHSLLYEYFTVYNELTKVKYVTEGMRKPAFLSGEQKKAIVDLLFKTNRKVTVKQLKEDYFKKIECFDSVEISGVEDRFNASLGTYHDLLKIIKDKDFLDNEENEDILEDIVLTLTLFEDREMIEERLKTYAHLFDDKVMKQLKRRRYTGWGRLSRKLINGIRDKQSGKTILDFLKSDGFANRNFMQLIHDDSLTFKEDIQKAQVSGQGDSLHEHIANLAGSPAIKKGILQTVKVVDELVKVMGRHKPENIVIEMARENQTTQKGQKNSRERMKRIEEGIKELGSQILKEHPVENTQLQNEKLYLYYLQNGRDMYVDQELDINRLSDYDVDHIVPQSFLKDDSIDNKVLTRSDKNRGKSDNVPSEEVVKKMKNYWRQLLNAKLITQRKFDNLTKAERGGLSELDKAGFIKRQLVETRQITKHVAQILDSRMNTKYDENDKLIREVKVITLKSKLVSDFRKDFQFYKVREINNYHHAHDAYLNAVVGTALIKKYPKLESEFVYGDYKVYDVRKMIAKSEQEIGKATAKYFFYSNIMNFFKTEITLANGEIRKRPLIETNGETGEIVWDKGRDFATVRKVLSMPQVNIVKKTEVQTGGFSKESILPKRNSDKLIARKKDWDPKKYGGFDSPTVAYSVLVVAKVEKGKSKKLKSVKELLGITIMERSSFEKNPIDFLEAKGYKEVKKDLIIKLPKYSLFELENGRKRMLASAGELQKGNELALPSKYVNFLYLASHYEKLKGSPEDNEQKQLFVEQHKHYLDEIIEQISEFSKRVILADANLDKVLSAYNKHRDKPIREQAENIIHLFTLTNLGAPAAFKYFDTTIDRKRYTSTKEVLDATLIHQSITGLYETRIDLSQLGGDAAPAAKRVKLD

SEQ ID NO: 178 - protein, 1395 aa, synthetic construct
MDKKYSIGLDIGTNSVGWAVITDEYKVPSKKFKVLGNTDRHSIKKNLIGALLFDSGETAEATRLKRTARRRYTRRKNRICYLQEIFSNEMAKVDDSFFHRLEESFLVEEDKKHERHPIFGNIVDEVAYHEKYPTIYHLRKKLVDSTDKADLRLIYLALAHMIKFRGHFLIEGDLNPDNSDVDKLFIQLVQTYNQLFEENPINASGVDAKAILSARLSKSRRLENLIAQLPGEKKNGLFGNLIALSLGLTPNFKSNFDLAEDAKLQLSKDTYDDDLDNLLAQIGDQYADLFLAAKNLSDAILLSDILRVNTEITKAPLSASMIKRYDEHHQDLTLLKALVRQQLPEKYKEIFFDQSKNGYAGYIDGGASQEEFYKFIKPILEKMDGTEELLVKLNREDLLRKQRTFDNGSIPHQIHLGELHAILRRQEDFYPFLKDNREKIEKILTFRIPYYVGPLARGNSRFAWMTRKSEETITPWNFEEVVDKGASAQSFIERMTNFDKNLPNEKVLPKHSLLYEYFTVYNELTKVKYVTEGMRKPAFLSGEQKKAIVDLLFKTNRKVTVKQLKEDYFKKIECFDSVEISGVEDRFNASLGTYHDLLKIIKDKDFLDNEENEDILEDIVLTLTLFEDREMIEERLKTYAHLFDDKVMKQLKRRRYTGWGRLSRKLINGIRDKQSGKTILDFLKSDGFANRNFMQLIHDDSLTFKEDIQKAQVSGQGDSLHEHIANLAGSPAIKKGILQTVKVVDELVKVMGRHKPENIVIEMARENQTTQKGQKNSRERMKRIEEGIKELGSQILKEHPVENTQLQNEKLYLYYLQNGRDMYVDQELDINRLSDYDVDHIVPQSFLKDDSIDNKVLTRSDKNRGKSDNVPSEEVVKKMKNYWRQLLNAKLITQRKFDNLTKAERGGLSELDKAGFIKRQLVETRQITKHVAQILDSRMNTKYDENDKLIREVKVITLKSKLVSDFRKDFQFYKVREINNYHHAHDAYLNAVVGTALIKKYPKLESEFVYGDYKVYDVRKMIAKSEQEIGKATAKYFFYSNIMNFFKTEITLANGEIRKRPLIETNGETGEIVWDKGRDFATVRKVLSMPQVNIVKKTEVQTGGFSKESILPKRNSDKLIARKKDWDPKKYGGFDSPTVAYSVLVVAKVEKGKSKKLKSVKELLGITIMERSSFEKNPIDFLEAKGYKEVKKDLIIKLPKYSLFELENGRKRMLASAGELQKGNELALPSKYVNFLYLASHYEKLKGSPEDNEQKQLFVEQHKHYLDEIIEQISEFSKRVILADANLDKVLSAYNKHRDKPIREQAENIIHLFTLTNLGAPAAFKYFDTTIDRKRYTSTKEVLDATLIHQSITGLYETRIDLSQLGGDAAMSRRRKANPTKLSENAKKLAKEVEN

SEQ ID NO: 179 - protein, 1382 aa, synthetic construct
MDKKYSIGLDIGTNSVGWAVITDEYKVPSKKFKVLGNTDRHSIKKNLIGALLFDSGETAEATRLKRTARRRYTRRKNRICYLQEIFSNEMAKVDDSFFHRLEESFLVEEDKKHERHPIFGNIVDEVAYHEKYPTIYHLRKKLVDSTDKADLRLIYLALAHMIKFRGHFLIEGDLNPDNSDVDKLFIQLVQTYNQLFEENPINASGVDAKAILSARLSKSRRLENLIAQLPGEKKNGLFGNLIALSLGLTPNFKSNFDLAEDAKLQLSKDTYDDDLDNLLAQIGDQYADLFLAAKNLSDAILLSDILRVNTEITKAPLSASMIKRYDEHHQDLTLLKALVRQQLPEKYKEIFFDQSKNGYAGYIDGGASQEEFYKFIKPILEKMDGTEELLVKLNREDLLRKQRTFDNGSIPHQIHLGELHAILRRQEDFYPFLKDNREKIEKILTFRIPYYVGPLARGNSRFAWMTRKSEETITPWNFEEVVDKGASAQSFIERMTNFDKNLPNEKVLPKHSLLYEYFTVYNELTKVKYVTEGMRKPAFLSGEQKKAIVDLLFKTNRKVTVKQLKEDYFKKIECFDSVEISGVEDRFNASLGTYHDLLKIIKDKDFLDNEENEDILEDIVLTLTLFEDREMIEERLKTYAHLFDDKVMKQLKRRRYTGWGRLSRKLINGIRDKQSGKTILDFLKSDGFANRNFMQLIHDDSLTFKEDIQKAQVSGQGDSLHEHIANLAGSPAIKKGILQTVKVVDELVKVMGRHKPENIVIEMARENQTTQKGQKNSRERMKRIEEGIKELGSQILKEHPVENTQLQNEKLYLYYLQNGRDMYVDQELDINRLSDYDVDHIVPQSFLKDDSIDNKVLTRSDKNRGKSDNVPSEEVVKKMKNYWRQLLNAKLITQRKFDNLTKAERGGLSELDKAGFIKRQLVETRQITKHVAQILDSRMNTKYDENDKLIREVKVITLKSKLVSDFRKDFQFYKVREINNYHHAHDAYLNAVVGTALIKKYPKLESEFVYGDYKVYDVRKMIAKSEQEIGKATAKYFFYSNIMNFFKTEITLANGEIRKRPLIETNGETGEIVWDKGRDFATVRKVLSMPQVNIVKKTEVQTGGFSKESILPKRNSDKLIARKKDWDPKKYGGFDSPTVAYSVLVVAKVEKGKSKKLKSVKELLGITIMERSSFEKNPIDFLEAKGYKEVKKDLIIKLPKYSLFELENGRKRMLASAGELQKGNELALPSKYVNFLYLASHYEKLKGSPEDNEQKQLFVEQHKHYLDEIIEQISEFSKRVILADANLDKVLSAYNKHRDKPIREQAENIIHLFTLTNLGAPAAFKYFDTTIDRKRYTSTKEVLDATLIHQSITGLYETRIDLSQLGGDAATLGKRKRISCVT

SEQ ID NO: 180 - protein, 1379 aa, synthetic construct
MDKKYSIGLDIGTNSVGWAVITDEYKVPSKKFKVLGNTDRHSIKKNLIGALLFDSGETAEATRLKRTARRRYTRRKNRICYLQEIFSNEMAKVDDSFFHRLEESFLVEEDKKHERHPIFGNIVDEVAYHEKYPTIYHLRKKLVDSTDKADLRLIYLALAHMIKFRGHFLIEGDLNPDNSDVDKLFIQLVQTYNQLFEENPINASGVDAKAILSARLSKSRRLENLIAQLPGEKKNGLFGNLIALSLGLTPNFKSNFDLAEDAKLQLSKDTYDDDLDNLLAQIGDQYADLFLAAKNLSDAILLSDILRVNTEITKAPLSASMIKRYDEHHQDLTLLKALVRQQLPEKYKEIFFDQSKNGYAGYIDGGASQEEFYKFIKPILEKMDGTEELLVKLNREDLLRKQRTFDNGSIPHQIHLGELHAILRRQEDFYPFLKDNREKIEKILTFRIPYYVGPLARGNSRFAWMTRKSEETITPWNFEEVVDKGASAQSFIERMTNFDKNLPNEKVLPKHSLLYEYFTVYNELTKVKYVTEGMRKPAFLSGEQKKAIVDLLFKTNRKVTVKQLKEDYFKKIECFDSVEISGVEDRFNASLGTYHDLLKIIKDKDFLDNEENEDILEDIVLTLTLFEDREMIEERLKTYAHLFDDKVMKQLKRRRYTGWGRLSRKLINGIRDKQSGKTILDFLKSDGFANRNFMQLIHDDSLTFKEDIQKAQVSGQGDSLHEHIANLAGSPAIKKGILQTVKVVDELVKVMGRHKPENIVIEMARENQTTQKGQKNSRERMKRIEEGIKELGSQILKEHPVENTQLQNEKLYLYYLQNGRDMYVDQELDINRLSDYDVDHIVPQSFLKDDSIDNKVLTRSDKNRGKSDNVPSEEVVKKMKNYWRQLLNAKLITQRKFDNLTKAERGGLSELDKAGFIKRQLVETRQITKHVAQILDSRMNTKYDENDKLIREVKVITLKSKLVSDFRKDFQFYKVREINNYHHAHDAYLNAVVGTALIKKYPKLESEFVYGDYKVYDVRKMIAKSEQEIGKATAKYFFYSNIMNFFKTEITLANGEIRKRPLIETNGETGEIVWDKGRDFATVRKVLSMPQVNIVKKTEVQTGGFSKESILPKRNSDKLIARKKDWDPKKYGGFDSPTVAYSVLVVAKVEKGKSKKLKSVKELLGITIMERSSFEKNPIDFLEAKGYKEVKKDLIIKLPKYSLFELENGRKRMLASAGELQKGNELALPSKYVNFLYLASHYEKLKGSPEDNEQKQLFVEQHKHYLDEIIEQISEFSKRVILADANLDKVLSAYNKHRDKPIREQAENIIHLFTLTNLGAPAAFKYFDTTIDRKRYTSTKEVLDATLIHQSITGLYETRIDLSQLGGDAAKLKIKRPVK

SEQ ID NO: 181 - protein, 1382 aa, synthetic construct
MDKKYSIGLDIGTNSVGWAVITDEYKVPSKKFKVLGNTDRHSIKKNLIGALLFDSGETAEATRLKRTARRRYTRRKNRICYLQEIFSNEMAKVDDSFFHRLEESFLVEEDKKHERHPIFGNIVDEVAYHEKYPTIYHLRKKLVDSTDKADLRLIYLALAHMIKFRGHFLIEGDLNPDNSDVDKLFIQLVQTYNQLFEENPINASGVDAKAILSARLSKSRRLENLIAQLPGEKKNGLFGNLIALSLGLTPNFKSNFDLAEDAKLQLSKDTYDDDLDNLLAQIGDQYADLFLAAKNLSDAILLSDILRVNTEITKAPLSASMIKRYDEHHQDLTLLKALVRQQLPEKYKEIFFDQSKNGYAGYIDGGASQEEFYKFIKPILEKMDGTEELLVKLNREDLLRKQRTFDNGSIPHQIHLGELHAILRRQEDFYPFLKDNREKIEKILTFRIPYYVGPLARGNSRFAWMTRKSEETITPWNFEEVVDKGASAQSFIERMTNFDKNLPNEKVLPKHSLLYEYFTVYNELTKVKYVTEGMRKPAFLSGEQKKAIVDLLFKTNRKVTVKQLKEDYFKKIECFDSVEISGVEDRFNASLGTYHDLLKIIKDKDFLDNEENEDILEDIVLTLTLFEDREMIEERLKTYAHLFDDKVMKQLKRRRYTGWGRLSRKLINGIRDKQSGKTILDFLKSDGFANRNFMQLIHDDSLTFKEDIQKAQVSGQGDSLHEHIANLAGSPAIKKGILQTVKVVDELVKVMGRHKPENIVIEMARENQTTQKGQKNSRERMKRIEEGIKELGSQILKEHPVENTQLQNEKLYLYYLQNGRDMYVDQELDINRLSDYDVDHIVPQSFLKDDSIDNKVLTRSDKNRGKSDNVPSEEVVKKMKNYWRQLLNAKLITQRKFDNLTKAERGGLSELDKAGFIKRQLVETRQITKHVAQILDSRMNTKYDENDKLIREVKVITLKSKLVSDFRKDFQFYKVREINNYHHAHDAYLNAVVGTALIKKYPKLESEFVYGDYKVYDVRKMIAKSEQEIGKATAKYFFYSNIMNFFKTEITLANGEIRKRPLIETNGETGEIVWDKGRDFATVRKVLSMPQVNIVKKTEVQTGGFSKESILPKRNSDKLIARKKDWDPKKYGGFDSPTVAYSVLVVAKVEKGKSKKLKSVKELLGITIMERSSFEKNPIDFLEAKGYKEVKKDLIIKLPKYSLFELENGRKRMLASAGELQKGNELALPSKYVNFLYLASHYEKLKGSPEDNEQKQLFVEQHKHYLDEIIEQISEFSKRVILADANLDKVLSAYNKHRDKPIREQAENIIHLFTLTNLGAPAAFKYFDTTIDRKRYTSTKEVLDATLIHQSITGLYETRIDLSQLGGDAARVLGKRKREDRP

SEQ ID NO: 182 - protein, 1382 aa, synthetic construct
MDKKYSIGLDIGTNSVGWAVITDEYKVPSKKFKVLGNTDRHSIKKNLIGALLFDSGETAEATRLKRTARRRYTRRKNRICYLQEIFSNEMAKVDDSFFHRLEESFLVEEDKKHERHPIFGNIVDEVAYHEKYPTIYHLRKKLVDSTDKADLRLIYLALAHMIKFRGHFLIEGDLNPDNSDVDKLFIQLVQTYNQLFEENPINASGVDAKAILSARLSKSRRLENLIAQLPGEKKNGLFGNLIALSLGLTPNFKSNFDLAEDAKLQLSKDTYDDDLDNLLAQIGDQYADLFLAAKNLSDAILLSDILRVNTEITKAPLSASMIKRYDEHHQDLTLLKALVRQQLPEKYKEIFFDQSKNGYAGYIDGGASQEEFYKFIKPILEKMDGTEELLVKLNREDLLRKQRTFDNGSIPHQIHLGELHAILRRQEDFYPFLKDNREKIEKILTFRIPYYVGPLARGNSRFAWMTRKSEETITPWNFEEVVDKGASAQSFIERMTNFDKNLPNEKVLPKHSLLYEYFTVYNELTKVKYVTEGMRKPAFLSGEQKKAIVDLLFKTNRKVTVKQLKEDYFKKIECFDSVEISGVEDRFNASLGTYHDLLKIIKDKDFLDNEENEDILEDIVLTLTLFEDREMIEERLKTYAHLFDDKVMKQLKRRRYTGWGRLSRKLINGIRDKQSGKTILDFLKSDGFANRNFMQLIHDDSLTFKEDIQKAQVSGQGDSLHEHIANLAGSPAIKKGILQTVKVVDELVKVMGRHKPENIVIEMARENQTTQKGQKNSRERMKRIEEGIKELGSQILKEHPVENTQLQNEKLYLYYLQNGRDMYVDQELDINRLSDYDVDHIVPQSFLKDDSIDNKVLTRSDKNRGKSDNVPSEEVVKKMKNYWRQLLNAKLITQRKFDNLTKAERGGLSELDKAGFIKRQLVETRQITKHVAQILDSRMNTKYDENDKLIREVKVITLKSKLVSDFRKDFQFYKVREINNYHHAHDAYLNAVVGTALIKKYPKLESEFVYGDYKVYDVRKMIAKSEQEIGKATAKYFFYSNIMNFFKTEITLANGEIRKRPLIETNGETGEIVWDKGRDFATVRKVLSMPQVNIVKKTEVQTGGFSKESILPKRNSDKLIARKKDWDPKKYGGFDSPTVAYSVLVVAKVEKGKSKKLKSVKELLGITIMERSSFEKNPIDFLEAKGYKEVKKDLIIKLPKYSLFELENGRKRMLASAGELQKGNELALPSKYVNFLYLASHYEKLKGSPEDNEQKQLFVEQHKHYLDEIIEQISEFSKRVILADANLDKVLSAYNKHRDKPIREQAENIIHLFTLTNLGAPAAFKYFDTTIDRKRYTSTKEVLDATLIHQSITGLYETRIDLSQLGGDAALLGKRKRPSIEH

SEQ ID NO: 183 - protein, 1382 aa, synthetic construct
MDKKYSIGLDIGTNSVGWAVITDEYKVPSKKFKVLGNTDRHSIKKNLIGALLFDSGETAEATRLKRTARRRYTRRKNRICYLQEIFSNEMAKVDDSFFHRLEESFLVEEDKKHERHPIFGNIVDEVAYHEKYPTIYHLRKKLVDSTDKADLRLIYLALAHMIKFRGHFLIEGDLNPDNSDVDKLFIQLVQTYNQLFEENPINASGVDAKAILSARLSKSRRLENLIAQLPGEKKNGLFGNLIALSLGLTPNFKSNFDLAEDAKLQLSKDTYDDDLDNLLAQIGDQYADLFLAAKNLSDAILLSDILRVNTEITKAPLSASMIKRYDEHHQDLTLLKALVRQQLPEKYKEIFFDQSKNGYAGYIDGGASQEEFYKFIKPILEKMDGTEELLVKLNREDLLRKQRTFDNGSIPHQIHLGELHAILRRQEDFYPFLKDNREKIEKILTFRIPYYVGPLARGNSRFAWMTRKSEETITPWNFEEVVDKGASAQSFIERMTNFDKNLPNEKVLPKHSLLYEYFTVYNELTKVKYVTEGMRKPAFLSGEQKKAIVDLLFKTNRKVTVKQLKEDYFKKIECFDSVEISGVEDRFNASLGTYHDLLKIIKDKDFLDNEENEDILEDIVLTLTLFEDREMIEERLKTYAHLFDDKVMKQLKRRRYTGWGRLSRKLINGIRDKQSGKTILDFLKSDGFANRNFMQLIHDDSLTFKEDIQKAQVSGQGDSLHEHIANLAGSPAIKKGILQTVKVVDELVKVMGRHKPENIVIEMARENQTTQKGQKNSRERMKRIEEGIKELGSQILKEHPVENTQLQNEKLYLYYLQNGRDMYVDQELDINRLSDYDVDHIVPQSFLKDDSIDNKVLTRSDKNRGKSDNVPSEEVVKKMKNYWRQLLNAKLITQRKFDNLTKAERGGLSELDKAGFIKRQLVETRQITKHVAQILDSRMNTKYDENDKLIREVKVITLKSKLVSDFRKDFQFYKVREINNYHHAHDAYLNAVVGTALIKKYPKLESEFVYGDYKVYDVRKMIAKSEQEIGKATAKYFFYSNIMNFFKTEITLANGEIRKRPLIETNGETGEIVWDKGRDFATVRKVLSMPQVNIVKKTEVQTGGFSKESILPKRNSDKLIARKKDWDPKKYGGFDSPTVAYSVLVVAKVEKGKSKKLKSVKELLGITIMERSSFEKNPIDFLEAKGYKEVKKDLIIKLPKYSLFELENGRKRMLASAGELQKGNELALPSKYVNFLYLASHYEKLKGSPEDNEQKQLFVEQHKHYLDEIIEQISEFSKRVILADANLDKVLSAYNKHRDKPIREQAENIIHLFTLTNLGAPAAFKYFDTTIDRKRYTSTKEVLDATLIHQSITGLYETRIDLSQLGGDAAPVLGKRKRSLSS

SEQ ID NO: 184 - protein, 1382 aa, synthetic construct
MDKKYSIGLDIGTNSVGWAVITDEYKVPSKKFKVLGNTDRHSIKKNLIGALLFDSGETAEATRLKRTARRRYTRRKNRICYLQEIFSNEMAKVDDSFFHRLEESFLVEEDKKHERHPIFGNIVDEVAYHEKYPTIYHLRKKLVDSTDKADLRLIYLALAHMIKFRGHFLIEGDLNPDNSDVDKLFIQLVQTYNQLFEENPINASGVDAKAILSARLSKSRRLENLIAQLPGEKKNGLFGNLIALSLGLTPNFKSNFDLAEDAKLQLSKDTYDDDLDNLLAQIGDQYADLFLAAKNLSDAILLSDILRVNTEITKAPLSASMIKRYDEHHQDLTLLKALVRQQLPEKYKEIFFDQSKNGYAGYIDGGASQEEFYKFIKPILEKMDGTEELLVKLNREDLLRKQRTFDNGSIPHQIHLGELHAILRRQEDFYPFLKDNREKIEKILTFRIPYYVGPLARGNSRFAWMTRKSEETITPWNFEEVVDKGASAQSFIERMTNFDKNLPNEKVLPKHSLLYEYFTVYNELTKVKYVTEGMRKPAFLSGEQKKAIVDLLFKTNRKVTVKQLKEDYFKKIECFDSVEISGVEDRFNASLGTYHDLLKIIKDKDFLDNEENEDILEDIVLTLTLFEDREMIEERLKTYAHLFDDKVMKQLKRRRYTGWGRLSRKLINGIRDKQSGKTILDFLKSDGFANRNFMQLIHDDSLTFKEDIQKAQVSGQGDSLHEHIANLAGSPAIKKGILQTVKVVDELVKVMGRHKPENIVIEMARENQTTQKGQKNSRERMKRIEEGIKELGSQILKEHPVENTQLQNEKLYLYYLQNGRDMYVDQELDINRLSDYDVDHIVPQSFLKDDSIDNKVLTRSDKNRGKSDNVPSEEVVKKMKNYWRQLLNAKLITQRKFDNLTKAERGGLSELDKAGFIKRQLVETRQITKHVAQILDSRMNTKYDENDKLIREVKVITLKSKLVSDFRKDFQFYKVREINNYHHAHDAYLNAVVGTALIKKYPKLESEFVYGDYKVYDVRKMIAKSEQEIGKATAKYFFYSNIMNFFKTEITLANGEIRKRPLIETNGETGEIVWDKGRDFATVRKVLSMPQVNIVKKTEVQTGGFSKESILPKRNSDKLIARKKDWDPKKYGGFDSPTVAYSVLVVAKVEKGKSKKLKSVKELLGITIMERSSFEKNPIDFLEAKGYKEVKKDLIIKLPKYSLFELENGRKRMLASAGELQKGNELALPSKYVNFLYLASHYEKLKGSPEDNEQKQLFVEQHKHYLDEIIEQISEFSKRVILADANLDKVLSAYNKHRDKPIREQAENIIHLFTLTNLGAPAAFKYFDTTIDRKRYTSTKEVLDATLIHQSITGLYETRIDLSQLGGDAAILGKRKRSHHPY

SEQ ID NO: 185 - protein, 1382 aa, synthetic construct
MDKKYSIGLDIGTNSVGWAVITDEYKVPSKKFKVLGNTDRHSIKKNLIGALLFDSGETAEATRLKRTARRRYTRRKNRICYLQEIFSNEMAKVDDSFFHRLEESFLVEEDKKHERHPIFGNIVDEVAYHEKYPTIYHLRKKLVDSTDKADLRLIYLALAHMIKFRGHFLIEGDLNPDNSDVDKLFIQLVQTYNQLFEENPINASGVDAKAILSARLSKSRRLENLIAQLPGEKKNGLFGNLIALSLGLTPNFKSNFDLAEDAKLQLSKDTYDDDLDNLLAQIGDQYADLFLAAKNLSDAILLSDILRVNTEITKAPLSASMIKRYDEHHQDLTLLKALVRQQLPEKYKEIFFDQSKNGYAGYIDGGASQEEFYKFIKPILEKMDGTEELLVKLNREDLLRKQRTFDNGSIPHQIHLGELHAILRRQEDFYPFLKDNREKIEKILTFRIPYYVGPLARGNSRFAWMTRKSEETITPWNFEEVVDKGASAQSFIERMTNFDKNLPNEKVLPKHSLLYEYFTVYNELTKVKYVTEGMRKPAFLSGEQKKAIVDLLFKTNRKVTVKQLKEDYFKKIECFDSVEISGVEDRFNASLGTYHDLLKIIKDKDFLDNEENEDILEDIVLTLTLFEDREMIEERLKTYAHLFDDKVMKQLKRRRYTGWGRLSRKLINGIRDKQSGKTILDFLKSDGFANRNFMQLIHDDSLTFKEDIQKAQVSGQGDSLHEHIANLAGSPAIKKGILQTVKVVDELVKVMGRHKPENIVIEMARENQTTQKGQKNSRERMKRIEEGIKELGSQILKEHPVENTQLQNEKLYLYYLQNGRDMYVDQELDINRLSDYDVDHIVPQSFLKDDSIDNKVLTRSDKNRGKSDNVPSEEVVKKMKNYWRQLLNAKLITQRKFDNLTKAERGGLSELDKAGFIKRQLVETRQITKHVAQILDSRMNTKYDENDKLIREVKVITLKSKLVSDFRKDFQFYKVREINNYHHAHDAYLNAVVGTALIKKYPKLESEFVYGDYKVYDVRKMIAKSEQEIGKATAKYFFYSNIMNFFKTEITLANGEIRKRPLIETNGETGEIVWDKGRDFATVRKVLSMPQVNIVKKTEVQTGGFSKESILPKRNSDKLIARKKDWDPKKYGGFDSPTVAYSVLVVAKVEKGKSKKLKSVKELLGITIMERSSFEKNPIDFLEAKGYKEVKKDLIIKLPKYSLFELENGRKRMLASAGELQKGNELALPSKYVNFLYLASHYEKLKGSPEDNEQKQLFVEQHKHYLDEIIEQISEFSKRVILADANLDKVLSAYNKHRDKPIREQAENIIHLFTLTNLGAPAAFKYFDTTIDRKRYTSTKEVLDATLIHQSITGLYETRIDLSQLGGDAASMLGKRKRCIIS

SEQ ID NO: 186 - protein, 1382 aa, synthetic construct
MDKKYSIGLDIGTNSVGWAVITDEYKVPSKKFKVLGNTDRHSIKKNLIGALLFDSGETAEATRLKRTARRRYTRRKNRICYLQEIFSNEMAKVDDSFFHRLEESFLVEEDKKHERHPIFGNIVDEVAYHEKYPTIYHLRKKLVDSTDKADLRLIYLALAHMIKFRGHFLIEGDLNPDNSDVDKLFIQLVQTYNQLFEENPINASGVDAKAILSARLSKSRRLENLIAQLPGEKKNGLFGNLIALSLGLTPNFKSNFDLAEDAKLQLSKDTYDDDLDNLLAQIGDQYADLFLAAKNLSDAILLSDILRVNTEITKAPLSASMIKRYDEHHQDLTLLKALVRQQLPEKYKEIFFDQSKNGYAGYIDGGASQEEFYKFIKPILEKMDGTEELLVKLNREDLLRKQRTFDNGSIPHQIHLGELHAILRRQEDFYPFLKDNREKIEKILTFRIPYYVGPLARGNSRFAWMTRKSEETITPWNFEEVVDKGASAQSFIERMTNFDKNLPNEKVLPKHSLLYEYFTVYNELTKVKYVTEGMRKPAFLSGEQKKAIVDLLFKTNRKVTVKQLKEDYFKKIECFDSVEISGVEDRFNASLGTYHDLLKIIKDKDFLDNEENEDILEDIVLTLTLFEDREMIEERLKTYAHLFDDKVMKQLKRRRYTGWGRLSRKLINGIRDKQSGKTILDFLKSDGFANRNFMQLIHDDSLTFKEDIQKAQVSGQGDSLHEHIANLAGSPAIKKGILQTVKVVDELVKVMGRHKPENIVIEMARENQTTQKGQKNSRERMKRIEEGIKELGSQILKEHPVENTQLQNEKLYLYYLQNGRDMYVDQELDINRLSDYDVDHIVPQSFLKDDSIDNKVLTRSDKNRGKSDNVPSEEVVKKMKNYWRQLLNAKLITQRKFDNLTKAERGGLSELDKAGFIKRQLVETRQITKHVAQILDSRMNTKYDENDKLIREVKVITLKSKLVSDFRKDFQFYKVREINNYHHAHDAYLNAVVGTALIKKYPKLESEFVYGDYKVYDVRKMIAKSEQEIGKATAKYFFYSNIMNFFKTEITLANGEIRKRPLIETNGETGEIVWDKGRDFATVRKVLSMPQVNIVKKTEVQTGGFSKESILPKRNSDKLIARKKDWDPKKYGGFDSPTVAYSVLVVAKVEKGKSKKLKSVKELLGITIMERSSFEKNPIDFLEAKGYKEVKKDLIIKLPKYSLFELENGRKRMLASAGELQKGNELALPSKYVNFLYLASHYEKLKGSPEDNEQKQLFVEQHKHYLDEIIEQISEFSKRVILADANLDKVLSAYNKHRDKPIREQAENIIHLFTLTNLGAPAAFKYFDTTIDRKRYTSTKEVLDATLIHQSITGLYETRIDLSQLGGDAASVLGKRKRHHLD

SEQ ID NO: 187 - protein, 1382 aa, synthetic construct
MDKKYSIGLDIGTNSVGWAVITDEYKVPSKKFKVLGNTDRHSIKKNLIGALLFDSGETAEATRLKRTARRRYTRRKNRICYLQEIFSNEMAKVDDSFFHRLEESFLVEEDKKHERHPIFGNIVDEVAYHEKYPTIYHLRKKLVDSTDKADLRLIYLALAHMIKFRGHFLIEGDLNPDNSDVDKLFIQLVQTYNQLFEENPINASGVDAKAILSARLSKSRRLENLIAQLPGEKKNGLFGNLIALSLGLTPNFKSNFDLAEDAKLQLSKDTYDDDLDNLLAQIGDQYADLFLAAKNLSDAILLSDILRVNTEITKAPLSASMIKRYDEHHQDLTLLKALVRQQLPEKYKEIFFDQSKNGYAGYIDGGASQEEFYKFIKPILEKMDGTEELLVKLNREDLLRKQRTFDNGSIPHQIHLGELHAILRRQEDFYPFLKDNREKIEKILTFRIPYYVGPLARGNSRFAWMTRKSEETITPWNFEEVVDKGASAQSFIERMTNFDKNLPNEKVLPKHSLLYEYFTVYNELTKVKYVTEGMRKPAFLSGEQKKAIVDLLFKTNRKVTVKQLKEDYFKKIECFDSVEISGVEDRFNASLGTYHDLLKIIKDKDFLDNEENEDILEDIVLTLTLFEDREMIEERLKTYAHLFDDKVMKQLKRRRYTGWGRLSRKLINGIRDKQSGKTILDFLKSDGFANRNFMQLIHDDSLTFKEDIQKAQVSGQGDSLHEHIANLAGSPAIKKGILQTVKVVDELVKVMGRHKPENIVIEMARENQTTQKGQKNSRERMKRIEEGIKELGSQILKEHPVENTQLQNEKLYLYYLQNGRDMYVDQELDINRLSDYDVDHIVPQSFLKDDSIDNKVLTRSDKNRGKSDNVPSEEVVKKMKNYWRQLLNAKLITQRKFDNLTKAERGGLSELDKAGFIKRQLVETRQITKHVAQILDSRMNTKYDENDKLIREVKVITLKSKLVSDFRKDFQFYKVREINNYHHAHDAYLNAVVGTALIKKYPKLESEFVYGDYKVYDVRKMIAKSEQEIGKATAKYFFYSNIMNFFKTEITLANGEIRKRPLIETNGETGEIVWDKGRDFATVRKVLSMPQVNIVKKTEVQTGGFSKESILPKRNSDKLIARKKDWDPKKYGGFDSPTVAYSVLVVAKVEKGKSKKLKSVKELLGITIMERSSFEKNPIDFLEAKGYKEVKKDLIIKLPKYSLFELENGRKRMLASAGELQKGNELALPSKYVNFLYLASHYEKLKGSPEDNEQKQLFVEQHKHYLDEIIEQISEFSKRVILADANLDKVLSAYNKHRDKPIREQAENIIHLFTLTNLGAPAAFKYFDTTIDRKRYTSTKEVLDATLIHQSITGLYETRIDLSQLGGDAATVHLGKRRLRPW

SEQ ID NO: 188 - protein, 1382 aa, synthetic construct
MDKKYSIGLDIGTNSVGWAVITDEYKVPSKKFKVLGNTDRHSIKKNLIGALLFDSGETAEATRLKRTARRRYTRRKNRICYLQEIFSNEMAKVDDSFFHRLEESFLVEEDKKHERHPIFGNIVDEVAYHEKYPTIYHLRKKLVDSTDKADLRLIYLALAHMIKFRGHFLIEGDLNPDNSDVDKLFIQLVQTYNQLFEENPINASGVDAKAILSARLSKSRRLENLIAQLPGEKKNGLFGNLIALSLGLTPNFKSNFDLAEDAKLQLSKDTYDDDLDNLLAQIGDQYADLFLAAKNLSDAILLSDILRVNTEITKAPLSASMIKRYDEHHQDLTLLKALVRQQLPEKYKEIFFDQSKNGYAGYIDGGASQEEFYKFIKPILEKMDGTEELLVKLNREDLLRKQRTFDNGSIPHQIHLGELHAILRRQEDFYPFLKDNREKIEKILTFRIPYYVGPLARGNSRFAWMTRKSEETITPWNFEEVVDKGASAQSFIERMTNFDKNLPNEKVLPKHSLLYEYFTVYNELTKVKYVTEGMRKPAFLSGEQKKAIVDLLFKTNRKVTVKQLKEDYFKKIECFDSVEISGVEDRFNASLGTYHDLLKIIKDKDFLDNEENEDILEDIVLTLTLFEDREMIEERLKTYAHLFDDKVMKQLKRRRYTGWGRLSRKLINGIRDKQSGKTILDFLKSDGFANRNFMQLIHDDSLTFKEDIQKAQVSGQGDSLHEHIANLAGSPAIKKGILQTVKVVDELVKVMGRHKPENIVIEMARENQTTQKGQKNSRERMKRIEEGIKELGSQILKEHPVENTQLQNEKLYLYYLQNGRDMYVDQELDINRLSDYDVDHIVPQSFLKDDSIDNKVLTRSDKNRGKSDNVPSEEVVKKMKNYWRQLLNAKLITQRKFDNLTKAERGGLSELDKAGFIKRQLVETRQITKHVAQILDSRMNTKYDENDKLIREVKVITLKSKLVSDFRKDFQFYKVREINNYHHAHDAYLNAVVGTALIKKYPKLESEFVYGDYKVYDVRKMIAKSEQEIGKATAKYFFYSNIMNFFKTEITLANGEIRKRPLIETNGETGEIVWDKGRDFATVRKVLSMPQVNIVKKTEVQTGGFSKESILPKRNSDKLIARKKDWDPKKYGGFDSPTVAYSVLVVAKVEKGKSKKLKSVKELLGITIMERSSFEKNPIDFLEAKGYKEVKKDLIIKLPKYSLFELENGRKRMLASAGELQKGNELALPSKYVNFLYLASHYEKLKGSPEDNEQKQLFVEQHKHYLDEIIEQISEFSKRVILADANLDKVLSAYNKHRDKPIREQAENIIHLFTLTNLGAPAAFKYFDTTIDRKRYTSTKEVLDATLIHQSITGLYETRIDLSQLGGDAASVLGKRKRHPKV

SEQ ID NO: 189 - protein, 1382 aa, synthetic construct
MDKKYSIGLDIGTNSVGWAVITDEYKVPSKKFKVLGNTDRHSIKKNLIGALLFDSGETAEATRLKRTARRRYTRRKNRICYLQEIFSNEMAKVDDSFFHRLEESFLVEEDKKHERHPIFGNIVDEVAYHEKYPTIYHLRKKLVDSTDKADLRLIYLALAHMIKFRGHFLIEGDLNPDNSDVDKLFIQLVQTYNQLFEENPINASGVDAKAILSARLSKSRRLENLIAQLPGEKKNGLFGNLIALSLGLTPNFKSNFDLAEDAKLQLSKDTYDDDLDNLLAQIGDQYADLFLAAKNLSDAILLSDILRVNTEITKAPLSASMIKRYDEHHQDLTLLKALVRQQLPEKYKEIFFDQSKNGYAGYIDGGASQEEFYKFIKPILEKMDGTEELLVKLNREDLLRKQRTFDNGSIPHQIHLGELHAILRRQEDFYPFLKDNREKIEKILTFRIPYYVGPLARGNSRFAWMTRKSEETITPWNFEEVVDKGASAQSFIERMTNFDKNLPNEKVLPKHSLLYEYFTVYNELTKVKYVTEGMRKPAFLSGEQKKAIVDLLFKTNRKVTVKQLKEDYFKKIECFDSVEISGVEDRFNASLGTYHDLLKIIKDKDFLDNEENEDILEDIVLTLTLFEDREMIEERLKTYAHLFDDKVMKQLKRRRYTGWGRLSRKLINGIRDKQSGKTILDFLKSDGFANRNFMQLIHDDSLTFKEDIQKAQVSGQGDSLHEHIANLAGSPAIKKGILQTVKVVDELVKVMGRHKPENIVIEMARENQTTQKGQKNSRERMKRIEEGIKELGSQILKEHPVENTQLQNEKLYLYYLQNGRDMYVDQELDINRLSDYDVDHIVPQSFLKDDSIDNKVLTRSDKNRGKSDNVPSEEVVKKMKNYWRQLLNAKLITQRKFDNLTKAERGGLSELDKAGFIKRQLVETRQITKHVAQILDSRMNTKYDENDKLIREVKVITLKSKLVSDFRKDFQFYKVREINNYHHAHDAYLNAVVGTALIKKYPKLESEFVYGDYKVYDVRKMIAKSEQEIGKATAKYFFYSNIMNFFKTEITLANGEIRKRPLIETNGETGEIVWDKGRDFATVRKVLSMPQVNIVKKTEVQTGGFSKESILPKRNSDKLIARKKDWDPKKYGGFDSPTVAYSVLVVAKVEKGKSKKLKSVKELLGITIMERSSFEKNPIDFLEAKGYKEVKKDLIIKLPKYSLFELENGRKRMLASAGELQKGNELALPSKYVNFLYLASHYEKLKGSPEDNEQKQLFVEQHKHYLDEIIEQISEFSKRVILADANLDKVLSAYNKHRDKPIREQAENIIHLFTLTNLGAPAAFKYFDTTIDRKRYTSTKEVLDATLIHQSITGLYETRIDLSQLGGDAASILGKRKNRDPS

SEQ ID NO: 190 - protein, 1382 aa, synthetic construct
MDKKYSIGLDIGTNSVGWAVITDEYKVPSKKFKVLGNTDRHSIKKNLIGALLFDSGETAEATRLKRTARRRYTRRKNRICYLQEIFSNEMAKVDDSFFHRLEESFLVEEDKKHERHPIFGNIVDEVAYHEKYPTIYHLRKKLVDSTDKADLRLIYLALAHMIKFRGHFLIEGDLNPDNSDVDKLFIQLVQTYNQLFEENPINASGVDAKAILSARLSKSRRLENLIAQLPGEKKNGLFGNLIALSLGLTPNFKSNFDLAEDAKLQLSKDTYDDDLDNLLAQIGDQYADLFLAAKNLSDAILLSDILRVNTEITKAPLSASMIKRYDEHHQDLTLLKALVRQQLPEKYKEIFFDQSKNGYAGYIDGGASQEEFYKFIKPILEKMDGTEELLVKLNREDLLRKQRTFDNGSIPHQIHLGELHAILRRQEDFYPFLKDNREKIEKILTFRIPYYVGPLARGNSRFAWMTRKSEETITPWNFEEVVDKGASAQSFIERMTNFDKNLPNEKVLPKHSLLYEYFTVYNELTKVKYVTEGMRKPAFLSGEQKKAIVDLLFKTNRKVTVKQLKEDYFKKIECFDSVEISGVEDRFNASLGTYHDLLKIIKDKDFLDNEENEDILEDIVLTLTLFEDREMIEERLKTYAHLFDDKVMKQLKRRRYTGWGRLSRKLINGIRDKQSGKTILDFLKSDGFANRNFMQLIHDDSLTFKEDIQKAQVSGQGDSLHEHIANLAGSPAIKKGILQTVKVVDELVKVMGRHKPENIVIEMARENQTTQKGQKNSRERMKRIEEGIKELGSQILKEHPVENTQLQNEKLYLYYLQNGRDMYVDQELDINRLSDYDVDHIVPQSFLKDDSIDNKVLTRSDKNRGKSDNVPSEEVVKKMKNYWRQLLNAKLITQRKFDNLTKAERGGLSELDKAGFIKRQLVETRQITKHVAQILDSRMNTKYDENDKLIREVKVITLKSKLVSDFRKDFQFYKVREINNYHHAHDAYLNAVVGTALIKKYPKLESEFVYGDYKVYDVRKMIAKSEQEIGKATAKYFFYSNIMNFFKTEITLANGEIRKRPLIETNGETGEIVWDKGRDFATVRKVLSMPQVNIVKKTEVQTGGFSKESILPKRNSDKLIARKKDWDPKKYGGFDSPTVAYSVLVVAKVEKGKSKKLKSVKELLGITIMERSSFEKNPIDFLEAKGYKEVKKDLIIKLPKYSLFELENGRKRMLASAGELQKGNELALPSKYVNFLYLASHYEKLKGSPEDNEQKQLFVEQHKHYLDEIIEQISEFSKRVILADANLDKVLSAYNKHRDKPIREQAENIIHLFTLTNLGAPAAFKYFDTTIDRKRYTSTKEVLDATLIHQSITGLYETRIDLSQLGGDAARVLGKRKTGRSP

SEQ ID NO: 191 - protein, 1381 aa, synthetic construct
MDKKYSIGLDIGTNSVGWAVITDEYKVPSKKFKVLGNTDRHSIKKNLIGALLFDSGETAEATRLKRTARRRYTRRKNRICYLQEIFSNEMAKVDDSFFHRLEESFLVEEDKKHERHPIFGNIVDEVAYHEKYPTIYHLRKKLVDSTDKADLRLIYLALAHMIKFRGHFLIEGDLNPDNSDVDKLFIQLVQTYNQLFEENPINASGVDAKAILSARLSKSRRLENLIAQLPGEKKNGLFGNLIALSLGLTPNFKSNFDLAEDAKLQLSKDTYDDDLDNLLAQIGDQYADLFLAAKNLSDAILLSDILRVNTEITKAPLSASMIKRYDEHHQDLTLLKALVRQQLPEKYKEIFFDQSKNGYAGYIDGGASQEEFYKFIKPILEKMDGTEELLVKLNREDLLRKQRTFDNGSIPHQIHLGELHAILRRQEDFYPFLKDNREKIEKILTFRIPYYVGPLARGNSRFAWMTRKSEETITPWNFEEVVDKGASAQSFIERMTNFDKNLPNEKVLPKHSLLYEYFTVYNELTKVKYVTEGMRKPAFLSGEQKKAIVDLLFKTNRKVTVKQLKEDYFKKIECFDSVEISGVEDRFNASLGTYHDLLKIIKDKDFLDNEENEDILEDIVLTLTLFEDREMIEERLKTYAHLFDDKVMKQLKRRRYTGWGRLSRKLINGIRDKQSGKTILDFLKSDGFANRNFMQLIHDDSLTFKEDIQKAQVSGQGDSLHEHIANLAGSPAIKKGILQTVKVVDELVKVMGRHKPENIVIEMARENQTTQKGQKNSRERMKRIEEGIKELGSQILKEHPVENTQLQNEKLYLYYLQNGRDMYVDQELDINRLSDYDVDHIVPQSFLKDDSIDNKVLTRSDKNRGKSDNVPSEEVVKKMKNYWRQLLNAKLITQRKFDNLTKAERGGLSELDKAGFIKRQLVETRQITKHVAQILDSRMNTKYDENDKLIREVKVITLKSKLVSDFRKDFQFYKVREINNYHHAHDAYLNAVVGTALIKKYPKLESEFVYGDYKVYDVRKMIAKSEQEIGKATAKYFFYSNIMNFFKTEITLANGEIRKRPLIETNGETGEIVWDKGRDFATVRKVLSMPQVNIVKKTEVQTGGFSKESILPKRNSDKLIARKKDWDPKKYGGFDSPTVAYSVLVVAKVEKGKSKKLKSVKELLGITIMERSSFEKNPIDFLEAKGYKEVKKDLIIKLPKYSLFELENGRKRMLASAGELQKGNELALPSKYVNFLYLASHYEKLKGSPEDNEQKQLFVEQHKHYLDEIIEQISEFSKRVILADANLDKVLSAYNKHRDKPIREQAENIIHLFTLTNLGAPAAFKYFDTTIDRKRYTSTKEVLDATLIHQSITGLYETRIDLSQLGGDAAVLGKRKRDDCW

SEQ ID NO: 192 - protein, 1382 aa, synthetic construct
MDKKYSIGLDIGTNSVGWAVITDEYKVPSKKFKVLGNTDRHSIKKNLIGALLFDSGETAEATRLKRTARRRYTRRKNRICYLQEIFSNEMAKVDDSFFHRLEESFLVEEDKKHERHPIFGNIVDEVAYHEKYPTIYHLRKKLVDSTDKADLRLIYLALAHMIKFRGHFLIEGDLNPDNSDVDKLFIQLVQTYNQLFEENPINASGVDAKAILSARLSKSRRLENLIAQLPGEKKNGLFGNLIALSLGLTPNFKSNFDLAEDAKLQLSKDTYDDDLDNLLAQIGDQYADLFLAAKNLSDAILLSDILRVNTEITKAPLSASMIKRYDEHHQDLTLLKALVRQQLPEKYKEIFFDQSKNGYAGYIDGGASQEEFYKFIKPILEKMDGTEELLVKLNREDLLRKQRTFDNGSIPHQIHLGELHAILRRQEDFYPFLKDNREKIEKILTFRIPYYVGPLARGNSRFAWMTRKSEETITPWNFEEVVDKGASAQSFIERMTNFDKNLPNEKVLPKHSLLYEYFTVYNELTKVKYVTEGMRKPAFLSGEQKKAIVDLLFKTNRKVTVKQLKEDYFKKIECFDSVEISGVEDRFNASLGTYHDLLKIIKDKDFLDNEENEDILEDIVLTLTLFEDREMIEERLKTYAHLFDDKVMKQLKRRRYTGWGRLSRKLINGIRDKQSGKTILDFLKSDGFANRNFMQLIHDDSLTFKEDIQKAQVSGQGDSLHEHIANLAGSPAIKKGILQTVKVVDELVKVMGRHKPENIVIEMARENQTTQKGQKNSRERMKRIEEGIKELGSQILKEHPVENTQLQNEKLYLYYLQNGRDMYVDQELDINRLSDYDVDHIVPQSFLKDDSIDNKVLTRSDKNRGKSDNVPSEEVVKKMKNYWRQLLNAKLITQRKFDNLTKAERGGLSELDKAGFIKRQLVETRQITKHVAQILDSRMNTKYDENDKLIREVKVITLKSKLVSDFRKDFQFYKVREINNYHHAHDAYLNAVVGTALIKKYPKLESEFVYGDYKVYDVRKMIAKSEQEIGKATAKYFFYSNIMNFFKTEITLANGEIRKRPLIETNGETGEIVWDKGRDFATVRKVLSMPQVNIVKKTEVQTGGFSKESILPKRNSDKLIARKKDWDPKKYGGFDSPTVAYSVLVVAKVEKGKSKKLKSVKELLGITIMERSSFEKNPIDFLEAKGYKEVKKDLIIKLPKYSLFELENGRKRMLASAGELQKGNELALPSKYVNFLYLASHYEKLKGSPEDNEQKQLFVEQHKHYLDEIIEQISEFSKRVILADANLDKVLSAYNKHRDKPIREQAENIIHLFTLTNLGAPAAFKYFDTTIDRKRYTSTKEVLDATLIHQSITGLYETRIDLSQLGGDAAKRKCAVFLEGQN

SEQ ID NO: 193 - protein, 1381 aa, synthetic construct
MDKKYSIGLDIGTNSVGWAVITDEYKVPSKKFKVLGNTDRHSIKKNLIGALLFDSGETAEATRLKRTARRRYTRRKNRICYLQEIFSNEMAKVDDSFFHRLEESFLVEEDKKHERHPIFGNIVDEVAYHEKYPTIYHLRKKLVDSTDKADLRLIYLALAHMIKFRGHFLIEGDLNPDNSDVDKLFIQLVQTYNQLFEENPINASGVDAKAILSARLSKSRRLENLIAQLPGEKKNGLFGNLIALSLGLTPNFKSNFDLAEDAKLQLSKDTYDDDLDNLLAQIGDQYADLFLAAKNLSDAILLSDILRVNTEITKAPLSASMIKRYDEHHQDLTLLKALVRQQLPEKYKEIFFDQSKNGYAGYIDGGASQEEFYKFIKPILEKMDGTEELLVKLNREDLLRKQRTFDNGSIPHQIHLGELHAILRRQEDFYPFLKDNREKIEKILTFRIPYYVGPLARGNSRFAWMTRKSEETITPWNFEEVVDKGASAQSFIERMTNFDKNLPNEKVLPKHSLLYEYFTVYNELTKVKYVTEGMRKPAFLSGEQKKAIVDLLFKTNRKVTVKQLKEDYFKKIECFDSVEISGVEDRFNASLGTYHDLLKIIKDKDFLDNEENEDILEDIVLTLTLFEDREMIEERLKTYAHLFDDKVMKQLKRRRYTGWGRLSRKLINGIRDKQSGKTILDFLKSDGFANRNFMQLIHDDSLTFKEDIQKAQVSGQGDSLHEHIANLAGSPAIKKGILQTVKVVDELVKVMGRHKPENIVIEMARENQTTQKGQKNSRERMKRIEEGIKELGSQILKEHPVENTQLQNEKLYLYYLQNGRDMYVDQELDINRLSDYDVDHIVPQSFLKDDSIDNKVLTRSDKNRGKSDNVPSEEVVKKMKNYWRQLLNAKLITQRKFDNLTKAERGGLSELDKAGFIKRQLVETRQITKHVAQILDSRMNTKYDENDKLIREVKVITLKSKLVSDFRKDFQFYKVREINNYHHAHDAYLNAVVGTALIKKYPKLESEFVYGDYKVYDVRKMIAKSEQEIGKATAKYFFYSNIMNFFKTEITLANGEIRKRPLIETNGETGEIVWDKGRDFATVRKVLSMPQVNIVKKTEVQTGGFSKESILPKRNSDKLIARKKDWDPKKYGGFDSPTVAYSVLVVAKVEKGKSKKLKSVKELLGITIMERSSFEKNPIDFLEAKGYKEVKKDLIIKLPKYSLFELENGRKRMLASAGELQKGNELALPSKYVNFLYLASHYEKLKGSPEDNEQKQLFVEQHKHYLDEIIEQISEFSKRVILADANLDKVLSAYNKHRDKPIREQAENIIHLFTLTNLGAPAAFKYFDTTIDRKRYTSTKEVLDATLIHQSITGLYETRIDLSQLGGDAAHGRQVLGKRKR

SEQ ID NO: 194 - protein, 1382 aa, synthetic construct
MDKKYSIGLDIGTNSVGWAVITDEYKVPSKKFKVLGNTDRHSIKKNLIGALLFDSGETAEATRLKRTARRRYTRRKNRICYLQEIFSNEMAKVDDSFFHRLEESFLVEEDKKHERHPIFGNIVDEVAYHEKYPTIYHLRKKLVDSTDKADLRLIYLALAHMIKFRGHFLIEGDLNPDNSDVDKLFIQLVQTYNQLFEENPINASGVDAKAILSARLSKSRRLENLIAQLPGEKKNGLFGNLIALSLGLTPNFKSNFDLAEDAKLQLSKDTYDDDLDNLLAQIGDQYADLFLAAKNLSDAILLSDILRVNTEITKAPLSASMIKRYDEHHQDLTLLKALVRQQLPEKYKEIFFDQSKNGYAGYIDGGASQEEFYKFIKPILEKMDGTEELLVKLNREDLLRKQRTFDNGSIPHQIHLGELHAILRRQEDFYPFLKDNREKIEKILTFRIPYYVGPLARGNSRFAWMTRKSEETITPWNFEEVVDKGASAQSFIERMTNFDKNLPNEKVLPKHSLLYEYFTVYNELTKVKYVTEGMRKPAFLSGEQKKAIVDLLFKTNRKVTVKQLKEDYFKKIECFDSVEISGVEDRFNASLGTYHDLLKIIKDKDFLDNEENEDILEDIVLTLTLFEDREMIEERLKTYAHLFDDKVMKQLKRRRYTGWGRLSRKLINGIRDKQSGKTILDFLKSDGFANRNFMQLIHDDSLTFKEDIQKAQVSGQGDSLHEHIANLAGSPAIKKGILQTVKVVDELVKVMGRHKPENIVIEMARENQTTQKGQKNSRERMKRIEEGIKELGSQILKEHPVENTQLQNEKLYLYYLQNGRDMYVDQELDINRLSDYDVDHIVPQSFLKDDSIDNKVLTRSDKNRGKSDNVPSEEVVKKMKNYWRQLLNAKLITQRKFDNLTKAERGGLSELDKAGFIKRQLVETRQITKHVAQILDSRMNTKYDENDKLIREVKVITLKSKLVSDFRKDFQFYKVREINNYHHAHDAYLNAVVGTALIKKYPKLESEFVYGDYKVYDVRKMIAKSEQEIGKATAKYFFYSNIMNFFKTEITLANGEIRKRPLIETNGETGEIVWDKGRDFATVRKVLSMPQVNIVKKTEVQTGGFSKESILPKRNSDKLIARKKDWDPKKYGGFDSPTVAYSVLVVAKVEKGKSKKLKSVKELLGITIMERSSFEKNPIDFLEAKGYKEVKKDLIIKLPKYSLFELENGRKRMLASAGELQKGNELALPSKYVNFLYLASHYEKLKGSPEDNEQKQLFVEQHKHYLDEIIEQISEFSKRVILADANLDKVLSAYNKHRDKPIREQAENIIHLFTLTNLGAPAAFKYFDTTIDRKRYTSTKEVLDATLIHQSITGLYETRIDLSQLGGDAAVHKTVLGKRKYW

SEQ ID NO: 195 - protein, 1382 aa, synthetic construct
MDKKYSIGLDIGTNSVGWAVITDEYKVPSKKFKVLGNTDRHSIKKNLIGALLFDSGETAEATRLKRTARRRYTRRKNRICYLQEIFSNEMAKVDDSFFHRLEESFLVEEDKKHERHPIFGNIVDEVAYHEKYPTIYHLRKKLVDSTDKADLRLIYLALAHMIKFRGHFLIEGDLNPDNSDVDKLFIQLVQTYNQLFEENPINASGVDAKAILSARLSKSRRLENLIAQLPGEKKNGLFGNLIALSLGLTPNFKSNFDLAEDAKLQLSKDTYDDDLDNLLAQIGDQYADLFLAAKNLSDAILLSDILRVNTEITKAPLSASMIKRYDEHHQDLTLLKALVRQQLPEKYKEIFFDQSKNGYAGYIDGGASQEEFYKFIKPILEKMDGTEELLVKLNREDLLRKQRTFDNGSIPHQIHLGELHAILRRQEDFYPFLKDNREKIEKILTFRIPYYVGPLARGNSRFAWMTRKSEETITPWNFEEVVDKGASAQSFIERMTNFDKNLPNEKVLPKHSLLYEYFTVYNELTKVKYVTEGMRKPAFLSGEQKKAIVDLLFKTNRKVTVKQLKEDYFKKIECFDSVEISGVEDRFNASLGTYHDLLKIIKDKDFLDNEENEDILEDIVLTLTLFEDREMIEERLKTYAHLFDDKVMKQLKRRRYTGWGRLSRKLINGIRDKQSGKTILDFLKSDGFANRNFMQLIHDDSLTFKEDIQKAQVSGQGDSLHEHIANLAGSPAIKKGILQTVKVVDELVKVMGRHKPENIVIEMARENQTTQKGQKNSRERMKRIEEGIKELGSQILKEHPVENTQLQNEKLYLYYLQNGRDMYVDQELDINRLSDYDVDHIVPQSFLKDDSIDNKVLTRSDKNRGKSDNVPSEEVVKKMKNYWRQLLNAKLITQRKFDNLTKAERGGLSELDKAGFIKRQLVETRQITKHVAQILDSRMNTKYDENDKLIREVKVITLKSKLVSDFRKDFQFYKVREINNYHHAHDAYLNAVVGTALIKKYPKLESEFVYGDYKVYDVRKMIAKSEQEIGKATAKYFFYSNIMNFFKTEITLANGEIRKRPLIETNGETGEIVWDKGRDFATVRKVLSMPQVNIVKKTEVQTGGFSKESILPKRNSDKLIARKKDWDPKKYGGFDSPTVAYSVLVVAKVEKGKSKKLKSVKELLGITIMERSSFEKNPIDFLEAKGYKEVKKDLIIKLPKYSLFELENGRKRMLASAGELQKGNELALPSKYVNFLYLASHYEKLKGSPEDNEQKQLFVEQHKHYLDEIIEQISEFSKRVILADANLDKVLSAYNKHRDKPIREQAENIIHLFTLTNLGAPAAFKYFDTTIDRKRYTSTKEVLDATLIHQSITGLYETRIDLSQLGGDAAKRKYAVFLESQN

SEQ ID NO: 196 - protein, 1382 aa, synthetic construct
MDKKYSIGLDIGTNSVGWAVITDEYKVPSKKFKVLGNTDRHSIKKNLIGALLFDSGETAEATRLKRTARRRYTRRKNRICYLQEIFSNEMAKVDDSFFHRLEESFLVEEDKKHERHPIFGNIVDEVAYHEKYPTIYHLRKKLVDSTDKADLRLIYLALAHMIKFRGHFLIEGDLNPDNSDVDKLFIQLVQTYNQLFEENPINASGVDAKAILSARLSKSRRLENLIAQLPGEKKNGLFGNLIALSLGLTPNFKSNFDLAEDAKLQLSKDTYDDDLDNLLAQIGDQYADLFLAAKNLSDAILLSDILRVNTEITKAPLSASMIKRYDEHHQDLTLLKALVRQQLPEKYKEIFFDQSKNGYAGYIDGGASQEEFYKFIKPILEKMDGTEELLVKLNREDLLRKQRTFDNGSIPHQIHLGELHAILRRQEDFYPFLKDNREKIEKILTFRIPYYVGPLARGNSRFAWMTRKSEETITPWNFEEVVDKGASAQSFIERMTNFDKNLPNEKVLPKHSLLYEYFTVYNELTKVKYVTEGMRKPAFLSGEQKKAIVDLLFKTNRKVTVKQLKEDYFKKIECFDSVEISGVEDRFNASLGTYHDLLKIIKDKDFLDNEENEDILEDIVLTLTLFEDREMIEERLKTYAHLFDDKVMKQLKRRRYTGWGRLSRKLINGIRDKQSGKTILDFLKSDGFANRNFMQLIHDDSLTFKEDIQKAQVSGQGDSLHEHIANLAGSPAIKKGILQTVKVVDELVKVMGRHKPENIVIEMARENQTTQKGQKNSRERMKRIEEGIKELGSQILKEHPVENTQLQNEKLYLYYLQNGRDMYVDQELDINRLSDYDVDHIVPQSFLKDDSIDNKVLTRSDKNRGKSDNVPSEEVVKKMKNYWRQLLNAKLITQRKFDNLTKAERGGLSELDKAGFIKRQLVETRQITKHVAQILDSRMNTKYDENDKLIREVKVITLKSKLVSDFRKDFQFYKVREINNYHHAHDAYLNAVVGTALIKKYPKLESEFVYGDYKVYDVRKMIAKSEQEIGKATAKYFFYSNIMNFFKTEITLANGEIRKRPLIETNGETGEIVWDKGRDFATVRKVLSMPQVNIVKKTEVQTGGFSKESILPKRNSDKLIARKKDWDPKKYGGFDSPTVAYSVLVVAKVEKGKSKKLKSVKELLGITIMERSSFEKNPIDFLEAKGYKEVKKDLIIKLPKYSLFELENGRKRMLASAGELQKGNELALPSKYVNFLYLASHYEKLKGSPEDNEQKQLFVEQHKHYLDEIIEQISEFSKRVILADANLDKVLSAYNKHRDKPIREQAENIIHLFTLTNLGAPAAFKYFDTTIDRKRYTSTKEVLDATLIHQSITGLYETRIDLSQLGGDAAKRKWMAFVMGDP

SEQ ID NO: 197 - protein, 1382 aa, synthetic construct
MDKKYSIGLDIGTNSVGWAVITDEYKVPSKKFKVLGNTDRHSIKKNLIGALLFDSGETAEATRLKRTARRRYTRRKNRICYLQEIFSNEMAKVDDSFFHRLEESFLVEEDKKHERHPIFGNIVDEVAYHEKYPTIYHLRKKLVDSTDKADLRLIYLALAHMIKFRGHFLIEGDLNPDNSDVDKLFIQLVQTYNQLFEENPINASGVDAKAILSARLSKSRRLENLIAQLPGEKKNGLFGNLIALSLGLTPNFKSNFDLAEDAKLQLSKDTYDDDLDNLLAQIGDQYADLFLAAKNLSDAILLSDILRVNTEITKAPLSASMIKRYDEHHQDLTLLKALVRQQLPEKYKEIFFDQSKNGYAGYIDGGASQEEFYKFIKPILEKMDGTEELLVKLNREDLLRKQRTFDNGSIPHQIHLGELHAILRRQEDFYPFLKDNREKIEKILTFRIPYYVGPLARGNSRFAWMTRKSEETITPWNFEEVVDKGASAQSFIERMTNFDKNLPNEKVLPKHSLLYEYFTVYNELTKVKYVTEGMRKPAFLSGEQKKAIVDLLFKTNRKVTVKQLKEDYFKKIECFDSVEISGVEDRFNASLGTYHDLLKIIKDKDFLDNEENEDILEDIVLTLTLFEDREMIEERLKTYAHLFDDKVMKQLKRRRYTGWGRLSRKLINGIRDKQSGKTILDFLKSDGFANRNFMQLIHDDSLTFKEDIQKAQVSGQGDSLHEHIANLAGSPAIKKGILQTVKVVDELVKVMGRHKPENIVIEMARENQTTQKGQKNSRERMKRIEEGIKELGSQILKEHPVENTQLQNEKLYLYYLQNGRDMYVDQELDINRLSDYDVDHIVPQSFLKDDSIDNKVLTRSDKNRGKSDNVPSEEVVKKMKNYWRQLLNAKLITQRKFDNLTKAERGGLSELDKAGFIKRQLVETRQITKHVAQILDSRMNTKYDENDKLIREVKVITLKSKLVSDFRKDFQFYKVREINNYHHAHDAYLNAVVGTALIKKYPKLESEFVYGDYKVYDVRKMIAKSEQEIGKATAKYFFYSNIMNFFKTEITLANGEIRKRPLIETNGETGEIVWDKGRDFATVRKVLSMPQVNIVKKTEVQTGGFSKESILPKRNSDKLIARKKDWDPKKYGGFDSPTVAYSVLVVAKVEKGKSKKLKSVKELLGITIMERSSFEKNPIDFLEAKGYKEVKKDLIIKLPKYSLFELENGRKRMLASAGELQKGNELALPSKYVNFLYLASHYEKLKGSPEDNEQKQLFVEQHKHYLDEIIEQISEFSKRVILADANLDKVLSAYNKHRDKPIREQAENIIHLFTLTNLGAPAAFKYFDTTIDRKRYTSTKEVLDATLIHQSITGLYETRIDLSQLGGDAAIPRKRSFAELYD

SEQ ID NO: 198 - protein, 1382 aa, synthetic construct
MDKKYSIGLDIGTNSVGWAVITDEYKVPSKKFKVLGNTDRHSIKKNLIGALLFDSGETAEATRLKRTARRRYTRRKNRICYLQEIFSNEMAKVDDSFFHRLEESFLVEEDKKHERHPIFGNIVDEVAYHEKYPTIYHLRKKLVDSTDKADLRLIYLALAHMIKFRGHFLIEGDLNPDNSDVDKLFIQLVQTYNQLFEENPINASGVDAKAILSARLSKSRRLENLIAQLPGEKKNGLFGNLIALSLGLTPNFKSNFDLAEDAKLQLSKDTYDDDLDNLLAQIGDQYADLFLAAKNLSDAILLSDILRVNTEITKAPLSASMIKRYDEHHQDLTLLKALVRQQLPEKYKEIFFDQSKNGYAGYIDGGASQEEFYKFIKPILEKMDGTEELLVKLNREDLLRKQRTFDNGSIPHQIHLGELHAILRRQEDFYPFLKDNREKIEKILTFRIPYYVGPLARGNSRFAWMTRKSEETITPWNFEEVVDKGASAQSFIERMTNFDKNLPNEKVLPKHSLLYEYFTVYNELTKVKYVTEGMRKPAFLSGEQKKAIVDLLFKTNRKVTVKQLKEDYFKKIECFDSVEISGVEDRFNASLGTYHDLLKIIKDKDFLDNEENEDILEDIVLTLTLFEDREMIEERLKTYAHLFDDKVMKQLKRRRYTGWGRLSRKLINGIRDKQSGKTILDFLKSDGFANRNFMQLIHDDSLTFKEDIQKAQVSGQGDSLHEHIANLAGSPAIKKGILQTVKVVDELVKVMGRHKPENIVIEMARENQTTQKGQKNSRERMKRIEEGIKELGSQILKEHPVENTQLQNEKLYLYYLQNGRDMYVDQELDINRLSDYDVDHIVPQSFLKDDSIDNKVLTRSDKNRGKSDNVPSEEVVKKMKNYWRQLLNAKLITQRKFDNLTKAERGGLSELDKAGFIKRQLVETRQITKHVAQILDSRMNTKYDENDKLIREVKVITLKSKLVSDFRKDFQFYKVREINNYHHAHDAYLNAVVGTALIKKYPKLESEFVYGDYKVYDVRKMIAKSEQEIGKATAKYFFYSNIMNFFKTEITLANGEIRKRPLIETNGETGEIVWDKGRDFATVRKVLSMPQVNIVKKTEVQTGGFSKESILPKRNSDKLIARKKDWDPKKYGGFDSPTVAYSVLVVAKVEKGKSKKLKSVKELLGITIMERSSFEKNPIDFLEAKGYKEVKKDLIIKLPKYSLFELENGRKRMLASAGELQKGNELALPSKYVNFLYLASHYEKLKGSPEDNEQKQLFVEQHKHYLDEIIEQISEFSKRVILADANLDKVLSAYNKHRDKPIREQAENIIHLFTLTNLGAPAAFKYFDTTIDRKRYTSTKEVLDATLIHQSITGLYETRIDLSQLGGDAAWAGRKRTWRDAF

SEQ ID NO: 199 - protein, 1382 aa, synthetic construct
MDKKYSIGLDIGTNSVGWAVITDEYKVPSKKFKVLGNTDRHSIKKNLIGALLFDSGETAEATRLKRTARRRYTRRKNRICYLQEIFSNEMAKVDDSFFHRLEESFLVEEDKKHERHPIFGNIVDEVAYHEKYPTIYHLRKKLVDSTDKADLRLIYLALAHMIKFRGHFLIEGDLNPDNSDVDKLFIQLVQTYNQLFEENPINASGVDAKAILSARLSKSRRLENLIAQLPGEKKNGLFGNLIALSLGLTPNFKSNFDLAEDAKLQLSKDTYDDDLDNLLAQIGDQYADLFLAAKNLSDAILLSDILRVNTEITKAPLSASMIKRYDEHHQDLTLLKALVRQQLPEKYKEIFFDQSKNGYAGYIDGGASQEEFYKFIKPILEKMDGTEELLVKLNREDLLRKQRTFDNGSIPHQIHLGELHAILRRQEDFYPFLKDNREKIEKILTFRIPYYVGPLARGNSRFAWMTRKSEETITPWNFEEVVDKGASAQSFIERMTNFDKNLPNEKVLPKHSLLYEYFTVYNELTKVKYVTEGMRKPAFLSGEQKKAIVDLLFKTNRKVTVKQLKEDYFKKIECFDSVEISGVEDRFNASLGTYHDLLKIIKDKDFLDNEENEDILEDIVLTLTLFEDREMIEERLKTYAHLFDDKVMKQLKRRRYTGWGRLSRKLINGIRDKQSGKTILDFLKSDGFANRNFMQLIHDDSLTFKEDIQKAQVSGQGDSLHEHIANLAGSPAIKKGILQTVKVVDELVKVMGRHKPENIVIEMARENQTTQKGQKNSRERMKRIEEGIKELGSQILKEHPVENTQLQNEKLYLYYLQNGRDMYVDQELDINRLSDYDVDHIVPQSFLKDDSIDNKVLTRSDKNRGKSDNVPSEEVVKKMKNYWRQLLNAKLITQRKFDNLTKAERGGLSELDKAGFIKRQLVETRQITKHVAQILDSRMNTKYDENDKLIREVKVITLKSKLVSDFRKDFQFYKVREINNYHHAHDAYLNAVVGTALIKKYPKLESEFVYGDYKVYDVRKMIAKSEQEIGKATAKYFFYSNIMNFFKTEITLANGEIRKRPLIETNGETGEIVWDKGRDFATVRKVLSMPQVNIVKKTEVQTGGFSKESILPKRNSDKLIARKKDWDPKKYGGFDSPTVAYSVLVVAKVEKGKSKKLKSVKELLGITIMERSSFEKNPIDFLEAKGYKEVKKDLIIKLPKYSLFELENGRKRMLASAGELQKGNELALPSKYVNFLYLASHYEKLKGSPEDNEQKQLFVEQHKHYLDEIIEQISEFSKRVILADANLDKVLSAYNKHRDKPIREQAENIIHLFTLTNLGAPAAFKYFDTTIDRKRYTSTKEVLDATLIHQSITGLYETRIDLSQLGGDAARLTPRKRAFSEV

SEQ ID NO: 200 - protein, 1382 aa, synthetic construct
MDKKYSIGLDIGTNSVGWAVITDEYKVPSKKFKVLGNTDRHSIKKNLIGALLFDSGETAEATRLKRTARRRYTRRKNRICYLQEIFSNEMAKVDDSFFHRLEESFLVEEDKKHERHPIFGNIVDEVAYHEKYPTIYHLRKKLVDSTDKADLRLIYLALAHMIKFRGHFLIEGDLNPDNSDVDKLFIQLVQTYNQLFEENPINASGVDAKAILSARLSKSRRLENLIAQLPGEKKNGLFGNLIALSLGLTPNFKSNFDLAEDAKLQLSKDTYDDDLDNLLAQIGDQYADLFLAAKNLSDAILLSDILRVNTEITKAPLSASMIKRYDEHHQDLTLLKALVRQQLPEKYKEIFFDQSKNGYAGYIDGGASQEEFYKFIKPILEKMDGTEELLVKLNREDLLRKQRTFDNGSIPHQIHLGELHAILRRQEDFYPFLKDNREKIEKILTFRIPYYVGPLARGNSRFAWMTRKSEETITPWNFEEVVDKGASAQSFIERMTNFDKNLPNEKVLPKHSLLYEYFTVYNELTKVKYVTEGMRKPAFLSGEQKKAIVDLLFKTNRKVTVKQLKEDYFKKIECFDSVEISGVEDRFNASLGTYHDLLKIIKDKDFLDNEENEDILEDIVLTLTLFEDREMIEERLKTYAHLFDDKVMKQLKRRRYTGWGRLSRKLINGIRDKQSGKTILDFLKSDGFANRNFMQLIHDDSLTFKEDIQKAQVSGQGDSLHEHIANLAGSPAIKKGILQTVKVVDELVKVMGRHKPENIVIEMARENQTTQKGQKNSRERMKRIEEGIKELGSQILKEHPVENTQLQNEKLYLYYLQNGRDMYVDQELDINRLSDYDVDHIVPQSFLKDDSIDNKVLTRSDKNRGKSDNVPSEEVVKKMKNYWRQLLNAKLITQRKFDNLTKAERGGLSELDKAGFIKRQLVETRQITKHVAQILDSRMNTKYDENDKLIREVKVITLKSKLVSDFRKDFQFYKVREINNYHHAHDAYLNAVVGTALIKKYPKLESEFVYGDYKVYDVRKMIAKSEQEIGKATAKYFFYSNIMNFFKTEITLANGEIRKRPLIETNGETGEIVWDKGRDFATVRKVLSMPQVNIVKKTEVQTGGFSKESILPKRNSDKLIARKKDWDPKKYGGFDSPTVAYSVLVVAKVEKGKSKKLKSVKELLGITIMERSSFEKNPIDFLEAKGYKEVKKDLIIKLPKYSLFELENGRKRMLASAGELQKGNELALPSKYVNFLYLASHYEKLKGSPEDNEQKQLFVEQHKHYLDEIIEQISEFSKRVILADANLDKVLSAYNKHRDKPIREQAENIIHLFTLTNLGAPAAFKYFDTTIDRKRYTSTKEVLDATLIHQSITGLYETRIDLSQLGGDAAQSVLGKRKSRPF

SEQ ID NO: 201 - protein, 1382 aa, synthetic construct
MDKKYSIGLDIGTNSVGWAVITDEYKVPSKKFKVLGNTDRHSIKKNLIGALLFDSGETAEATRLKRTARRRYTRRKNRICYLQEIFSNEMAKVDDSFFHRLEESFLVEEDKKHERHPIFGNIVDEVAYHEKYPTIYHLRKKLVDSTDKADLRLIYLALAHMIKFRGHFLIEGDLNPDNSDVDKLFIQLVQTYNQLFEENPINASGVDAKAILSARLSKSRRLENLIAQLPGEKKNGLFGNLIALSLGLTPNFKSNFDLAEDAKLQLSKDTYDDDLDNLLAQIGDQYADLFLAAKNLSDAILLSDILRVNTEITKAPLSASMIKRYDEHHQDLTLLKALVRQQLPEKYKEIFFDQSKNGYAGYIDGGASQEEFYKFIKPILEKMDGTEELLVKLNREDLLRKQRTFDNGSIPHQIHLGELHAILRRQEDFYPFLKDNREKIEKILTFRIPYYVGPLARGNSRFAWMTRKSEETITPWNFEEVVDKGASAQSFIERMTNFDKNLPNEKVLPKHSLLYEYFTVYNELTKVKYVTEGMRKPAFLSGEQKKAIVDLLFKTNRKVTVKQLKEDYFKKIECFDSVEISGVEDRFNASLGTYHDLLKIIKDKDFLDNEENEDILEDIVLTLTLFEDREMIEERLKTYAHLFDDKVMKQLKRRRYTGWGRLSRKLINGIRDKQSGKTILDFLKSDGFANRNFMQLIHDDSLTFKEDIQKAQVSGQGDSLHEHIANLAGSPAIKKGILQTVKVVDELVKVMGRHKPENIVIEMARENQTTQKGQKNSRERMKRIEEGIKELGSQILKEHPVENTQLQNEKLYLYYLQNGRDMYVDQELDINRLSDYDVDHIVPQSFLKDDSIDNKVLTRSDKNRGKSDNVPSEEVVKKMKNYWRQLLNAKLITQRKFDNLTKAERGGLSELDKAGFIKRQLVETRQITKHVAQILDSRMNTKYDENDKLIREVKVITLKSKLVSDFRKDFQFYKVREINNYHHAHDAYLNAVVGTALIKKYPKLESEFVYGDYKVYDVRKMIAKSEQEIGKATAKYFFYSNIMNFFKTEITLANGEIRKRPLIETNGETGEIVWDKGRDFATVRKVLSMPQVNIVKKTEVQTGGFSKESILPKRNSDKLIARKKDWDPKKYGGFDSPTVAYSVLVVAKVEKGKSKKLKSVKELLGITIMERSSFEKNPIDFLEAKGYKEVKKDLIIKLPKYSLFELENGRKRMLASAGELQKGNELALPSKYVNFLYLASHYEKLKGSPEDNEQKQLFVEQHKHYLDEIIEQISEFSKRVILADANLDKVLSAYNKHRDKPIREQAENIIHLFTLTNLGAPAAFKYFDTTIDRKRYTSTKEVLDATLIHQSITGLYETRIDLSQLGGDAASSHRKRKFSDAF

SEQ ID NO: 202 - protein, 1382 aa, synthetic construct
MDKKYSIGLDIGTNSVGWAVITDEYKVPSKKFKVLGNTDRHSIKKNLIGALLFDSGETAEATRLKRTARRRYTRRKNRICYLQEIFSNEMAKVDDSFFHRLEESFLVEEDKKHERHPIFGNIVDEVAYHEKYPTIYHLRKKLVDSTDKADLRLIYLALAHMIKFRGHFLIEGDLNPDNSDVDKLFIQLVQTYNQLFEENPINASGVDAKAILSARLSKSRRLENLIAQLPGEKKNGLFGNLIALSLGLTPNFKSNFDLAEDAKLQLSKDTYDDDLDNLLAQIGDQYADLFLAAKNLSDAILLSDILRVNTEITKAPLSASMIKRYDEHHQDLTLLKALVRQQLPEKYKEIFFDQSKNGYAGYIDGGASQEEFYKFIKPILEKMDGTEELLVKLNREDLLRKQRTFDNGSIPHQIHLGELHAILRRQEDFYPFLKDNREKIEKILTFRIPYYVGPLARGNSRFAWMTRKSEETITPWNFEEVVDKGASAQSFIERMTNFDKNLPNEKVLPKHSLLYEYFTVYNELTKVKYVTEGMRKPAFLSGEQKKAIVDLLFKTNRKVTVKQLKEDYFKKIECFDSVEISGVEDRFNASLGTYHDLLKIIKDKDFLDNEENEDILEDIVLTLTLFEDREMIEERLKTYAHLFDDKVMKQLKRRRYTGWGRLSRKLINGIRDKQSGKTILDFLKSDGFANRNFMQLIHDDSLTFKEDIQKAQVSGQGDSLHEHIANLAGSPAIKKGILQTVKVVDELVKVMGRHKPENIVIEMARENQTTQKGQKNSRERMKRIEEGIKELGSQILKEHPVENTQLQNEKLYLYYLQNGRDMYVDQELDINRLSDYDVDHIVPQSFLKDDSIDNKVLTRSDKNRGKSDNVPSEEVVKKMKNYWRQLLNAKLITQRKFDNLTKAERGGLSELDKAGFIKRQLVETRQITKHVAQILDSRMNTKYDENDKLIREVKVITLKSKLVSDFRKDFQFYKVREINNYHHAHDAYLNAVVGTALIKKYPKLESEFVYGDYKVYDVRKMIAKSEQEIGKATAKYFFYSNIMNFFKTEITLANGEIRKRPLIETNGETGEIVWDKGRDFATVRKVLSMPQVNIVKKTEVQTGGFSKESILPKRNSDKLIARKKDWDPKKYGGFDSPTVAYSVLVVAKVEKGKSKKLKSVKELLGITIMERSSFEKNPIDFLEAKGYKEVKKDLIIKLPKYSLFELENGRKRMLASAGELQKGNELALPSKYVNFLYLASHYEKLKGSPEDNEQKQLFVEQHKHYLDEIIEQISEFSKRVILADANLDKVLSAYNKHRDKPIREQAENIIHLFTLTNLGAPAAFKYFDTTIDRKRYTSTKEVLDATLIHQSITGLYETRIDLSQLGGDAAPSHRKRKFSDAF

SEQ ID NO: 203 - protein, 1382 aa, synthetic construct
MDKKYSIGLDIGTNSVGWAVITDEYKVPSKKFKVLGNTDRHSIKKNLIGALLFDSGETAEATRLKRTARRRYTRRKNRICYLQEIFSNEMAKVDDSFFHRLEESFLVEEDKKHERHPIFGNIVDEVAYHEKYPTIYHLRKKLVDSTDKADLRLIYLALAHMIKFRGHFLIEGDLNPDNSDVDKLFIQLVQTYNQLFEENPINASGVDAKAILSARLSKSRRLENLIAQLPGEKKNGLFGNLIALSLGLTPNFKSNFDLAEDAKLQLSKDTYDDDLDNLLAQIGDQYADLFLAAKNLSDAILLSDILRVNTEITKAPLSASMIKRYDEHHQDLTLLKALVRQQLPEKYKEIFFDQSKNGYAGYIDGGASQEEFYKFIKPILEKMDGTEELLVKLNREDLLRKQRTFDNGSIPHQIHLGELHAILRRQEDFYPFLKDNREKIEKILTFRIPYYVGPLARGNSRFAWMTRKSEETITPWNFEEVVDKGASAQSFIERMTNFDKNLPNEKVLPKHSLLYEYFTVYNELTKVKYVTEGMRKPAFLSGEQKKAIVDLLFKTNRKVTVKQLKEDYFKKIECFDSVEISGVEDRFNASLGTYHDLLKIIKDKDFLDNEENEDILEDIVLTLTLFEDREMIEERLKTYAHLFDDKVMKQLKRRRYTGWGRLSRKLINGIRDKQSGKTILDFLKSDGFANRNFMQLIHDDSLTFKEDIQKAQVSGQGDSLHEHIANLAGSPAIKKGILQTVKVVDELVKVMGRHKPENIVIEMARENQTTQKGQKNSRERMKRIEEGIKELGSQILKEHPVENTQLQNEKLYLYYLQNGRDMYVDQELDINRLSDYDVDHIVPQSFLKDDSIDNKVLTRSDKNRGKSDNVPSEEVVKKMKNYWRQLLNAKLITQRKFDNLTKAERGGLSELDKAGFIKRQLVETRQITKHVAQILDSRMNTKYDENDKLIREVKVITLKSKLVSDFRKDFQFYKVREINNYHHAHDAYLNAVVGTALIKKYPKLESEFVYGDYKVYDVRKMIAKSEQEIGKATAKYFFYSNIMNFFKTEITLANGEIRKRPLIETNGETGEIVWDKGRDFATVRKVLSMPQVNIVKKTEVQTGGFSKESILPKRNSDKLIARKKDWDPKKYGGFDSPTVAYSVLVVAKVEKGKSKKLKSVKELLGITIMERSSFEKNPIDFLEAKGYKEVKKDLIIKLPKYSLFELENGRKRMLASAGELQKGNELALPSKYVNFLYLASHYEKLKGSPEDNEQKQLFVEQHKHYLDEIIEQISEFSKRVILADANLDKVLSAYNKHRDKPIREQAENIIHLFTLTNLGAPAAFKYFDTTIDRKRYTSTKEVLDATLIHQSITGLYETRIDLSQLGGDAATAHRKRKFSDAF

SEQ ID NO: 204 - protein, 1382 aa, synthetic construct
MDKKYSIGLDIGTNSVGWAVITDEYKVPSKKFKVLGNTDRHSIKKNLIGALLFDSGETAEATRLKRTARRRYTRRKNRICYLQEIFSNEMAKVDDSFFHRLEESFLVEEDKKHERHPIFGNIVDEVAYHEKYPTIYHLRKKLVDSTDKADLRLIYLALAHMIKFRGHFLIEGDLNPDNSDVDKLFIQLVQTYNQLFEENPINASGVDAKAILSARLSKSRRLENLIAQLPGEKKNGLFGNLIALSLGLTPNFKSNFDLAEDAKLQLSKDTYDDDLDNLLAQIGDQYADLFLAAKNLSDAILLSDILRVNTEITKAPLSASMIKRYDEHHQDLTLLKALVRQQLPEKYKEIFFDQSKNGYAGYIDGGASQEEFYKFIKPILEKMDGTEELLVKLNREDLLRKQRTFDNGSIPHQIHLGELHAILRRQEDFYPFLKDNREKIEKILTFRIPYYVGPLARGNSRFAWMTRKSEETITPWNFEEVVDKGASAQSFIERMTNFDKNLPNEKVLPKHSLLYEYFTVYNELTKVKYVTEGMRKPAFLSGEQKKAIVDLLFKTNRKVTVKQLKEDYFKKIECFDSVEISGVEDRFNASLGTYHDLLKIIKDKDFLDNEENEDILEDIVLTLTLFEDREMIEERLKTYAHLFDDKVMKQLKRRRYTGWGRLSRKLINGIRDKQSGKTILDFLKSDGFANRNFMQLIHDDSLTFKEDIQKAQVSGQGDSLHEHIANLAGSPAIKKGILQTVKVVDELVKVMGRHKPENIVIEMARENQTTQKGQKNSRERMKRIEEGIKELGSQILKEHPVENTQLQNEKLYLYYLQNGRDMYVDQELDINRLSDYDVDHIVPQSFLKDDSIDNKVLTRSDKNRGKSDNVPSEEVVKKMKNYWRQLLNAKLITQRKFDNLTKAERGGLSELDKAGFIKRQLVETRQITKHVAQILDSRMNTKYDENDKLIREVKVITLKSKLVSDFRKDFQFYKVREINNYHHAHDAYLNAVVGTALIKKYPKLESEFVYGDYKVYDVRKMIAKSEQEIGKATAKYFFYSNIMNFFKTEITLANGEIRKRPLIETNGETGEIVWDKGRDFATVRKVLSMPQVNIVKKTEVQTGGFSKESILPKRNSDKLIARKKDWDPKKYGGFDSPTVAYSVLVVAKVEKGKSKKLKSVKELLGITIMERSSFEKNPIDFLEAKGYKEVKKDLIIKLPKYSLFELENGRKRMLASAGELQKGNELALPSKYVNFLYLASHYEKLKGSPEDNEQKQLFVEQHKHYLDEIIEQISEFSKRVILADANLDKVLSAYNKHRDKPIREQAENIIHLFTLTNLGAPAAFKYFDTTIDRKRYTSTKEVLDATLIHQSITGLYETRIDLSQLGGDAARVQRKRKWSEAF

SEQ ID NO: 205 - protein, 1382 aa, synthetic construct
MDKKYSIGLDIGTNSVGWAVITDEYKVPSKKFKVLGNTDRHSIKKNLIGALLFDSGETAEATRLKRTARRRYTRRKNRICYLQEIFSNEMAKVDDSFFHRLEESFLVEEDKKHERHPIFGNIVDEVAYHEKYPTIYHLRKKLVDSTDKADLRLIYLALAHMIKFRGHFLIEGDLNPDNSDVDKLFIQLVQTYNQLFEENPINASGVDAKAILSARLSKSRRLENLIAQLPGEKKNGLFGNLIALSLGLTPNFKSNFDLAEDAKLQLSKDTYDDDLDNLLAQIGDQYADLFLAAKNLSDAILLSDILRVNTEITKAPLSASMIKRYDEHHQDLTLLKALVRQQLPEKYKEIFFDQSKNGYAGYIDGGASQEEFYKFIKPILEKMDGTEELLVKLNREDLLRKQRTFDNGSIPHQIHLGELHAILRRQEDFYPFLKDNREKIEKILTFRIPYYVGPLARGNSRFAWMTRKSEETITPWNFEEVVDKGASAQSFIERMTNFDKNLPNEKVLPKHSLLYEYFTVYNELTKVKYVTEGMRKPAFLSGEQKKAIVDLLFKTNRKVTVKQLKEDYFKKIECFDSVEISGVEDRFNASLGTYHDLLKIIKDKDFLDNEENEDILEDIVLTLTLFEDREMIEERLKTYAHLFDDKVMKQLKRRRYTGWGRLSRKLINGIRDKQSGKTILDFLKSDGFANRNFMQLIHDDSLTFKEDIQKAQVSGQGDSLHEHIANLAGSPAIKKGILQTVKVVDELVKVMGRHKPENIVIEMARENQTTQKGQKNSRERMKRIEEGIKELGSQILKEHPVENTQLQNEKLYLYYLQNGRDMYVDQELDINRLSDYDVDHIVPQSFLKDDSIDNKVLTRSDKNRGKSDNVPSEEVVKKMKNYWRQLLNAKLITQRKFDNLTKAERGGLSELDKAGFIKRQLVETRQITKHVAQILDSRMNTKYDENDKLIREVKVITLKSKLVSDFRKDFQFYKVREINNYHHAHDAYLNAVVGTALIKKYPKLESEFVYGDYKVYDVRKMIAKSEQEIGKATAKYFFYSNIMNFFKTEITLANGEIRKRPLIETNGETGEIVWDKGRDFATVRKVLSMPQVNIVKKTEVQTGGFSKESILPKRNSDKLIARKKDWDPKKYGGFDSPTVAYSVLVVAKVEKGKSKKLKSVKELLGITIMERSSFEKNPIDFLEAKGYKEVKKDLIIKLPKYSLFELENGRKRMLASAGELQKGNELALPSKYVNFLYLASHYEKLKGSPEDNEQKQLFVEQHKHYLDEIIEQISEFSKRVILADANLDKVLSAYNKHRDKPIREQAENIIHLFTLTNLGAPAAFKYFDTTIDRKRYTSTKEVLDATLIHQSITGLYETRIDLSQLGGDAAHRYCGKRRRRTR

SEQ ID NO: 206 - protein, 1382 aa, synthetic construct
MDKKYSIGLDIGTNSVGWAVITDEYKVPSKKFKVLGNTDRHSIKKNLIGALLFDSGETAEATRLKRTARRRYTRRKNRICYLQEIFSNEMAKVDDSFFHRLEESFLVEEDKKHERHPIFGNIVDEVAYHEKYPTIYHLRKKLVDSTDKADLRLIYLALAHMIKFRGHFLIEGDLNPDNSDVDKLFIQLVQTYNQLFEENPINASGVDAKAILSARLSKSRRLENLIAQLPGEKKNGLFGNLIALSLGLTPNFKSNFDLAEDAKLQLSKDTYDDDLDNLLAQIGDQYADLFLAAKNLSDAILLSDILRVNTEITKAPLSASMIKRYDEHHQDLTLLKALVRQQLPEKYKEIFFDQSKNGYAGYIDGGASQEEFYKFIKPILEKMDGTEELLVKLNREDLLRKQRTFDNGSIPHQIHLGELHAILRRQEDFYPFLKDNREKIEKILTFRIPYYVGPLARGNSRFAWMTRKSEETITPWNFEEVVDKGASAQSFIERMTNFDKNLPNEKVLPKHSLLYEYFTVYNELTKVKYVTEGMRKPAFLSGEQKKAIVDLLFKTNRKVTVKQLKEDYFKKIECFDSVEISGVEDRFNASLGTYHDLLKIIKDKDFLDNEENEDILEDIVLTLTLFEDREMIEERLKTYAHLFDDKVMKQLKRRRYTGWGRLSRKLINGIRDKQSGKTILDFLKSDGFANRNFMQLIHDDSLTFKEDIQKAQVSGQGDSLHEHIANLAGSPAIKKGILQTVKVVDELVKVMGRHKPENIVIEMARENQTTQKGQKNSRERMKRIEEGIKELGSQILKEHPVENTQLQNEKLYLYYLQNGRDMYVDQELDINRLSDYDVDHIVPQSFLKDDSIDNKVLTRSDKNRGKSDNVPSEEVVKKMKNYWRQLLNAKLITQRKFDNLTKAERGGLSELDKAGFIKRQLVETRQITKHVAQILDSRMNTKYDENDKLIREVKVITLKSKLVSDFRKDFQFYKVREINNYHHAHDAYLNAVVGTALIKKYPKLESEFVYGDYKVYDVRKMIAKSEQEIGKATAKYFFYSNIMNFFKTEITLANGEIRKRPLIETNGETGEIVWDKGRDFATVRKVLSMPQVNIVKKTEVQTGGFSKESILPKRNSDKLIARKKDWDPKKYGGFDSPTVAYSVLVVAKVEKGKSKKLKSVKELLGITIMERSSFEKNPIDFLEAKGYKEVKKDLIIKLPKYSLFELENGRKRMLASAGELQKGNELALPSKYVNFLYLASHYEKLKGSPEDNEQKQLFVEQHKHYLDEIIEQISEFSKRVILADANLDKVLSAYNKHRDKPIREQAENIIHLFTLTNLGAPAAFKYFDTTIDRKRYTSTKEVLDATLIHQSITGLYETRIDLSQLGGDAATYSGVKRKRNVV

SEQ ID NO: 207 - protein, 1382 aa, synthetic construct
MDKKYSIGLDIGTNSVGWAVITDEYKVPSKKFKVLGNTDRHSIKKNLIGALLFDSGETAEATRLKRTARRRYTRRKNRICYLQEIFSNEMAKVDDSFFHRLEESFLVEEDKKHERHPIFGNIVDEVAYHEKYPTIYHLRKKLVDSTDKADLRLIYLALAHMIKFRGHFLIEGDLNPDNSDVDKLFIQLVQTYNQLFEENPINASGVDAKAILSARLSKSRRLENLIAQLPGEKKNGLFGNLIALSLGLTPNFKSNFDLAEDAKLQLSKDTYDDDLDNLLAQIGDQYADLFLAAKNLSDAILLSDILRVNTEITKAPLSASMIKRYDEHHQDLTLLKALVRQQLPEKYKEIFFDQSKNGYAGYIDGGASQEEFYKFIKPILEKMDGTEELLVKLNREDLLRKQRTFDNGSIPHQIHLGELHAILRRQEDFYPFLKDNREKIEKILTFRIPYYVGPLARGNSRFAWMTRKSEETITPWNFEEVVDKGASAQSFIERMTNFDKNLPNEKVLPKHSLLYEYFTVYNELTKVKYVTEGMRKPAFLSGEQKKAIVDLLFKTNRKVTVKQLKEDYFKKIECFDSVEISGVEDRFNASLGTYHDLLKIIKDKDFLDNEENEDILEDIVLTLTLFEDREMIEERLKTYAHLFDDKVMKQLKRRRYTGWGRLSRKLINGIRDKQSGKTILDFLKSDGFANRNFMQLIHDDSLTFKEDIQKAQVSGQGDSLHEHIANLAGSPAIKKGILQTVKVVDELVKVMGRHKPENIVIEMARENQTTQKGQKNSRERMKRIEEGIKELGSQILKEHPVENTQLQNEKLYLYYLQNGRDMYVDQELDINRLSDYDVDHIVPQSFLKDDSIDNKVLTRSDKNRGKSDNVPSEEVVKKMKNYWRQLLNAKLITQRKFDNLTKAERGGLSELDKAGFIKRQLVETRQITKHVAQILDSRMNTKYDENDKLIREVKVITLKSKLVSDFRKDFQFYKVREINNYHHAHDAYLNAVVGTALIKKYPKLESEFVYGDYKVYDVRKMIAKSEQEIGKATAKYFFYSNIMNFFKTEITLANGEIRKRPLIETNGETGEIVWDKGRDFATVRKVLSMPQVNIVKKTEVQTGGFSKESILPKRNSDKLIARKKDWDPKKYGGFDSPTVAYSVLVVAKVEKGKSKKLKSVKELLGITIMERSSFEKNPIDFLEAKGYKEVKKDLIIKLPKYSLFELENGRKRMLASAGELQKGNELALPSKYVNFLYLASHYEKLKGSPEDNEQKQLFVEQHKHYLDEIIEQISEFSKRVILADANLDKVLSAYNKHRDKPIREQAENIIHLFTLTNLGAPAAFKYFDTTIDRKRYTSTKEVLDATLIHQSITGLYETRIDLSQLGGDAARLTRKRKYDCAF

SEQ ID NO: 208 - protein, 1382 aa, synthetic construct
MDKKYSIGLDIGTNSVGWAVITDEYKVPSKKFKVLGNTDRHSIKKNLIGALLFDSGETAEATRLKRTARRRYTRRKNRICYLQEIFSNEMAKVDDSFFHRLEESFLVEEDKKHERHPIFGNIVDEVAYHEKYPTIYHLRKKLVDSTDKADLRLIYLALAHMIKFRGHFLIEGDLNPDNSDVDKLFIQLVQTYNQLFEENPINASGVDAKAILSARLSKSRRLENLIAQLPGEKKNGLFGNLIALSLGLTPNFKSNFDLAEDAKLQLSKDTYDDDLDNLLAQIGDQYADLFLAAKNLSDAILLSDILRVNTEITKAPLSASMIKRYDEHHQDLTLLKALVRQQLPEKYKEIFFDQSKNGYAGYIDGGASQEEFYKFIKPILEKMDGTEELLVKLNREDLLRKQRTFDNGSIPHQIHLGELHAILRRQEDFYPFLKDNREKIEKILTFRIPYYVGPLARGNSRFAWMTRKSEETITPWNFEEVVDKGASAQSFIERMTNFDKNLPNEKVLPKHSLLYEYFTVYNELTKVKYVTEGMRKPAFLSGEQKKAIVDLLFKTNRKVTVKQLKEDYFKKIECFDSVEISGVEDRFNASLGTYHDLLKIIKDKDFLDNEENEDILEDIVLTLTLFEDREMIEERLKTYAHLFDDKVMKQLKRRRYTGWGRLSRKLINGIRDKQSGKTILDFLKSDGFANRNFMQLIHDDSLTFKEDIQKAQVSGQGDSLHEHIANLAGSPAIKKGILQTVKVVDELVKVMGRHKPENIVIEMARENQTTQKGQKNSRERMKRIEEGIKELGSQILKEHPVENTQLQNEKLYLYYLQNGRDMYVDQELDINRLSDYDVDHIVPQSFLKDDSIDNKVLTRSDKNRGKSDNVPSEEVVKKMKNYWRQLLNAKLITQRKFDNLTKAERGGLSELDKAGFIKRQLVETRQITKHVAQILDSRMNTKYDENDKLIREVKVITLKSKLVSDFRKDFQFYKVREINNYHHAHDAYLNAVVGTALIKKYPKLESEFVYGDYKVYDVRKMIAKSEQEIGKATAKYFFYSNIMNFFKTEITLANGEIRKRPLIETNGETGEIVWDKGRDFATVRKVLSMPQVNIVKKTEVQTGGFSKESILPKRNSDKLIARKKDWDPKKYGGFDSPTVAYSVLVVAKVEKGKSKKLKSVKELLGITIMERSSFEKNPIDFLEAKGYKEVKKDLIIKLPKYSLFELENGRKRMLASAGELQKGNELALPSKYVNFLYLASHYEKLKGSPEDNEQKQLFVEQHKHYLDEIIEQISEFSKRVILADANLDKVLSAYNKHRDKPIREQAENIIHLFTLTNLGAPAAFKYFDTTIDRKRYTSTKEVLDATLIHQSITGLYETRIDLSQLGGDAAKRKYSIYLGSQS

SEQ ID NO: 209 - protein, 1382 aa, synthetic construct
MDKKYSIGLDIGTNSVGWAVITDEYKVPSKKFKVLGNTDRHSIKKNLIGALLFDSGETAEATRLKRTARRRYTRRKNRICYLQEIFSNEMAKVDDSFFHRLEESFLVEEDKKHERHPIFGNIVDEVAYHEKYPTIYHLRKKLVDSTDKADLRLIYLALAHMIKFRGHFLIEGDLNPDNSDVDKLFIQLVQTYNQLFEENPINASGVDAKAILSARLSKSRRLENLIAQLPGEKKNGLFGNLIALSLGLTPNFKSNFDLAEDAKLQLSKDTYDDDLDNLLAQIGDQYADLFLAAKNLSDAILLSDILRVNTEITKAPLSASMIKRYDEHHQDLTLLKALVRQQLPEKYKEIFFDQSKNGYAGYIDGGASQEEFYKFIKPILEKMDGTEELLVKLNREDLLRKQRTFDNGSIPHQIHLGELHAILRRQEDFYPFLKDNREKIEKILTFRIPYYVGPLARGNSRFAWMTRKSEETITPWNFEEVVDKGASAQSFIERMTNFDKNLPNEKVLPKHSLLYEYFTVYNELTKVKYVTEGMRKPAFLSGEQKKAIVDLLFKTNRKVTVKQLKEDYFKKIECFDSVEISGVEDRFNASLGTYHDLLKIIKDKDFLDNEENEDILEDIVLTLTLFEDREMIEERLKTYAHLFDDKVMKQLKRRRYTGWGRLSRKLINGIRDKQSGKTILDFLKSDGFANRNFMQLIHDDSLTFKEDIQKAQVSGQGDSLHEHIANLAGSPAIKKGILQTVKVVDELVKVMGRHKPENIVIEMARENQTTQKGQKNSRERMKRIEEGIKELGSQILKEHPVENTQLQNEKLYLYYLQNGRDMYVDQELDINRLSDYDVDHIVPQSFLKDDSIDNKVLTRSDKNRGKSDNVPSEEVVKKMKNYWRQLLNAKLITQRKFDNLTKAERGGLSELDKAGFIKRQLVETRQITKHVAQILDSRMNTKYDENDKLIREVKVITLKSKLVSDFRKDFQFYKVREINNYHHAHDAYLNAVVGTALIKKYPKLESEFVYGDYKVYDVRKMIAKSEQEIGKATAKYFFYSNIMNFFKTEITLANGEIRKRPLIETNGETGEIVWDKGRDFATVRKVLSMPQVNIVKKTEVQTGGFSKESILPKRNSDKLIARKKDWDPKKYGGFDSPTVAYSVLVVAKVEKGKSKKLKSVKELLGITIMERSSFEKNPIDFLEAKGYKEVKKDLIIKLPKYSLFELENGRKRMLASAGELQKGNELALPSKYVNFLYLASHYEKLKGSPEDNEQKQLFVEQHKHYLDEIIEQISEFSKRVILADANLDKVLSAYNKHRDKPIREQAENIIHLFTLTNLGAPAAFKYFDTTIDRKRYTSTKEVLDATLIHQSITGLYETRIDLSQLGGDAALVNRKRRYWEAF

SEQ ID NO: 210 - protein, 1382 aa, synthetic construct
MDKKYSIGLDIGTNSVGWAVITDEYKVPSKKFKVLGNTDRHSIKKNLIGALLFDSGETAEATRLKRTARRRYTRRKNRICYLQEIFSNEMAKVDDSFFHRLEESFLVEEDKKHERHPIFGNIVDEVAYHEKYPTIYHLRKKLVDSTDKADLRLIYLALAHMIKFRGHFLIEGDLNPDNSDVDKLFIQLVQTYNQLFEENPINASGVDAKAILSARLSKSRRLENLIAQLPGEKKNGLFGNLIALSLGLTPNFKSNFDLAEDAKLQLSKDTYDDDLDNLLAQIGDQYADLFLAAKNLSDAILLSDILRVNTEITKAPLSASMIKRYDEHHQDLTLLKALVRQQLPEKYKEIFFDQSKNGYAGYIDGGASQEEFYKFIKPILEKMDGTEELLVKLNREDLLRKQRTFDNGSIPHQIHLGELHAILRRQEDFYPFLKDNREKIEKILTFRIPYYVGPLARGNSRFAWMTRKSEETITPWNFEEVVDKGASAQSFIERMTNFDKNLPNEKVLPKHSLLYEYFTVYNELTKVKYVTEGMRKPAFLSGEQKKAIVDLLFKTNRKVTVKQLKEDYFKKIECFDSVEISGVEDRFNASLGTYHDLLKIIKDKDFLDNEENEDILEDIVLTLTLFEDREMIEERLKTYAHLFDDKVMKQLKRRRYTGWGRLSRKLINGIRDKQSGKTILDFLKSDGFANRNFMQLIHDDSLTFKEDIQKAQVSGQGDSLHEHIANLAGSPAIKKGILQTVKVVDELVKVMGRHKPENIVIEMARENQTTQKGQKNSRERMKRIEEGIKELGSQILKEHPVENTQLQNEKLYLYYLQNGRDMYVDQELDINRLSDYDVDHIVPQSFLKDDSIDNKVLTRSDKNRGKSDNVPSEEVVKKMKNYWRQLLNAKLITQRKFDNLTKAERGGLSELDKAGFIKRQLVETRQITKHVAQILDSRMNTKYDENDKLIREVKVITLKSKLVSDFRKDFQFYKVREINNYHHAHDAYLNAVVGTALIKKYPKLESEFVYGDYKVYDVRKMIAKSEQEIGKATAKYFFYSNIMNFFKTEITLANGEIRKRPLIETNGETGEIVWDKGRDFATVRKVLSMPQVNIVKKTEVQTGGFSKESILPKRNSDKLIARKKDWDPKKYGGFDSPTVAYSVLVVAKVEKGKSKKLKSVKELLGITIMERSSFEKNPIDFLEAKGYKEVKKDLIIKLPKYSLFELENGRKRMLASAGELQKGNELALPSKYVNFLYLASHYEKLKGSPEDNEQKQLFVEQHKHYLDEIIEQISEFSKRVILADANLDKVLSAYNKHRDKPIREQAENIIHLFTLTNLGAPAAFKYFDTTIDRKRYTSTKEVLDATLIHQSITGLYETRIDLSQLGGDAATHIGYKRKRDSV

SEQ ID NO: 211 - protein, 1382 aa, synthetic construct
MDKKYSIGLDIGTNSVGWAVITDEYKVPSKKFKVLGNTDRHSIKKNLIGALLFDSGETAEATRLKRTARRRYTRRKNRICYLQEIFSNEMAKVDDSFFHRLEESFLVEEDKKHERHPIFGNIVDEVAYHEKYPTIYHLRKKLVDSTDKADLRLIYLALAHMIKFRGHFLIEGDLNPDNSDVDKLFIQLVQTYNQLFEENPINASGVDAKAILSARLSKSRRLENLIAQLPGEKKNGLFGNLIALSLGLTPNFKSNFDLAEDAKLQLSKDTYDDDLDNLLAQIGDQYADLFLAAKNLSDAILLSDILRVNTEITKAPLSASMIKRYDEHHQDLTLLKALVRQQLPEKYKEIFFDQSKNGYAGYIDGGASQEEFYKFIKPILEKMDGTEELLVKLNREDLLRKQRTFDNGSIPHQIHLGELHAILRRQEDFYPFLKDNREKIEKILTFRIPYYVGPLARGNSRFAWMTRKSEETITPWNFEEVVDKGASAQSFIERMTNFDKNLPNEKVLPKHSLLYEYFTVYNELTKVKYVTEGMRKPAFLSGEQKKAIVDLLFKTNRKVTVKQLKEDYFKKIECFDSVEISGVEDRFNASLGTYHDLLKIIKDKDFLDNEENEDILEDIVLTLTLFEDREMIEERLKTYAHLFDDKVMKQLKRRRYTGWGRLSRKLINGIRDKQSGKTILDFLKSDGFANRNFMQLIHDDSLTFKEDIQKAQVSGQGDSLHEHIANLAGSPAIKKGILQTVKVVDELVKVMGRHKPENIVIEMARENQTTQKGQKNSRERMKRIEEGIKELGSQILKEHPVENTQLQNEKLYLYYLQNGRDMYVDQELDINRLSDYDVDHIVPQSFLKDDSIDNKVLTRSDKNRGKSDNVPSEEVVKKMKNYWRQLLNAKLITQRKFDNLTKAERGGLSELDKAGFIKRQLVETRQITKHVAQILDSRMNTKYDENDKLIREVKVITLKSKLVSDFRKDFQFYKVREINNYHHAHDAYLNAVVGTALIKKYPKLESEFVYGDYKVYDVRKMIAKSEQEIGKATAKYFFYSNIMNFFKTEITLANGEIRKRPLIETNGETGEIVWDKGRDFATVRKVLSMPQVNIVKKTEVQTGGFSKESILPKRNSDKLIARKKDWDPKKYGGFDSPTVAYSVLVVAKVEKGKSKKLKSVKELLGITIMERSSFEKNPIDFLEAKGYKEVKKDLIIKLPKYSLFELENGRKRMLASAGELQKGNELALPSKYVNFLYLASHYEKLKGSPEDNEQKQLFVEQHKHYLDEIIEQISEFSKRVILADANLDKVLSAYNKHRDKPIREQAENIIHLFTLTNLGAPAAFKYFDTTIDRKRYTSTKEVLDATLIHQSITGLYETRIDLSQLGGDAAKKGKRKRLVRPW

SEQ ID NO: 212 - protein, 1382 aa, synthetic construct
MDKKYSIGLDIGTNSVGWAVITDEYKVPSKKFKVLGNTDRHSIKKNLIGALLFDSGETAEATRLKRTARRRYTRRKNRICYLQEIFSNEMAKVDDSFFHRLEESFLVEEDKKHERHPIFGNIVDEVAYHEKYPTIYHLRKKLVDSTDKADLRLIYLALAHMIKFRGHFLIEGDLNPDNSDVDKLFIQLVQTYNQLFEENPINASGVDAKAILSARLSKSRRLENLIAQLPGEKKNGLFGNLIALSLGLTPNFKSNFDLAEDAKLQLSKDTYDDDLDNLLAQIGDQYADLFLAAKNLSDAILLSDILRVNTEITKAPLSASMIKRYDEHHQDLTLLKALVRQQLPEKYKEIFFDQSKNGYAGYIDGGASQEEFYKFIKPILEKMDGTEELLVKLNREDLLRKQRTFDNGSIPHQIHLGELHAILRRQEDFYPFLKDNREKIEKILTFRIPYYVGPLARGNSRFAWMTRKSEETITPWNFEEVVDKGASAQSFIERMTNFDKNLPNEKVLPKHSLLYEYFTVYNELTKVKYVTEGMRKPAFLSGEQKKAIVDLLFKTNRKVTVKQLKEDYFKKIECFDSVEISGVEDRFNASLGTYHDLLKIIKDKDFLDNEENEDILEDIVLTLTLFEDREMIEERLKTYAHLFDDKVMKQLKRRRYTGWGRLSRKLINGIRDKQSGKTILDFLKSDGFANRNFMQLIHDDSLTFKEDIQKAQVSGQGDSLHEHIANLAGSPAIKKGILQTVKVVDELVKVMGRHKPENIVIEMARENQTTQKGQKNSRERMKRIEEGIKELGSQILKEHPVENTQLQNEKLYLYYLQNGRDMYVDQELDINRLSDYDVDHIVPQSFLKDDSIDNKVLTRSDKNRGKSDNVPSEEVVKKMKNYWRQLLNAKLITQRKFDNLTKAERGGLSELDKAGFIKRQLVETRQITKHVAQILDSRMNTKYDENDKLIREVKVITLKSKLVSDFRKDFQFYKVREINNYHHAHDAYLNAVVGTALIKKYPKLESEFVYGDYKVYDVRKMIAKSEQEIGKATAKYFFYSNIMNFFKTEITLANGEIRKRPLIETNGETGEIVWDKGRDFATVRKVLSMPQVNIVKKTEVQTGGFSKESILPKRNSDKLIARKKDWDPKKYGGFDSPTVAYSVLVVAKVEKGKSKKLKSVKELLGITIMERSSFEKNPIDFLEAKGYKEVKKDLIIKLPKYSLFELENGRKRMLASAGELQKGNELALPSKYVNFLYLASHYEKLKGSPEDNEQKQLFVEQHKHYLDEIIEQISEFSKRVILADANLDKVLSAYNKHRDKPIREQAENIIHLFTLTNLGAPAAFKYFDTTIDRKRYTSTKEVLDATLIHQSITGLYETRIDLSQLGGDAAYGRVSKRPRYQF

SEQ ID NO: 213 - protein, 1381 aa, synthetic construct
MDKKYSIGLDIGTNSVGWAVITDEYKVPSKKFKVLGNTDRHSIKKNLIGALLFDSGETAEATRLKRTARRRYTRRKNRICYLQEIFSNEMAKVDDSFFHRLEESFLVEEDKKHERHPIFGNIVDEVAYHEKYPTIYHLRKKLVDSTDKADLRLIYLALAHMIKFRGHFLIEGDLNPDNSDVDKLFIQLVQTYNQLFEENPINASGVDAKAILSARLSKSRRLENLIAQLPGEKKNGLFGNLIALSLGLTPNFKSNFDLAEDAKLQLSKDTYDDDLDNLLAQIGDQYADLFLAAKNLSDAILLSDILRVNTEITKAPLSASMIKRYDEHHQDLTLLKALVRQQLPEKYKEIFFDQSKNGYAGYIDGGASQEEFYKFIKPILEKMDGTEELLVKLNREDLLRKQRTFDNGSIPHQIHLGELHAILRRQEDFYPFLKDNREKIEKILTFRIPYYVGPLARGNSRFAWMTRKSEETITPWNFEEVVDKGASAQSFIERMTNFDKNLPNEKVLPKHSLLYEYFTVYNELTKVKYVTEGMRKPAFLSGEQKKAIVDLLFKTNRKVTVKQLKEDYFKKIECFDSVEISGVEDRFNASLGTYHDLLKIIKDKDFLDNEENEDILEDIVLTLTLFEDREMIEERLKTYAHLFDDKVMKQLKRRRYTGWGRLSRKLINGIRDKQSGKTILDFLKSDGFANRNFMQLIHDDSLTFKEDIQKAQVSGQGDSLHEHIANLAGSPAIKKGILQTVKVVDELVKVMGRHKPENIVIEMARENQTTQKGQKNSRERMKRIEEGIKELGSQILKEHPVENTQLQNEKLYLYYLQNGRDMYVDQELDINRLSDYDVDHIVPQSFLKDDSIDNKVLTRSDKNRGKSDNVPSEEVVKKMKNYWRQLLNAKLITQRKFDNLTKAERGGLSELDKAGFIKRQLVETRQITKHVAQILDSRMNTKYDENDKLIREVKVITLKSKLVSDFRKDFQFYKVREINNYHHAHDAYLNAVVGTALIKKYPKLESEFVYGDYKVYDVRKMIAKSEQEIGKATAKYFFYSNIMNFFKTEITLANGEIRKRPLIETNGETGEIVWDKGRDFATVRKVLSMPQVNIVKKTEVQTGGFSKESILPKRNSDKLIARKKDWDPKKYGGFDSPTVAYSVLVVAKVEKGKSKKLKSVKELLGITIMERSSFEKNPIDFLEAKGYKEVKKDLIIKLPKYSLFELENGRKRMLASAGELQKGNELALPSKYVNFLYLASHYEKLKGSPEDNEQKQLFVEQHKHYLDEIIEQISEFSKRVILADANLDKVLSAYNKHRDKPIREQAENIIHLFTLTNLGAPAAFKYFDTTIDRKRYTSTKEVLDATLIHQSITGLYETRIDLSQLGGDAASVLGKRSRTWE

SEQ ID NO: 214 - protein, 1382 aa, synthetic construct
MDKKYSIGLDIGTNSVGWAVITDEYKVPSKKFKVLGNTDRHSIKKNLIGALLFDSGETAEATRLKRTARRRYTRRKNRICYLQEIFSNEMAKVDDSFFHRLEESFLVEEDKKHERHPIFGNIVDEVAYHEKYPTIYHLRKKLVDSTDKADLRLIYLALAHMIKFRGHFLIEGDLNPDNSDVDKLFIQLVQTYNQLFEENPINASGVDAKAILSARLSKSRRLENLIAQLPGEKKNGLFGNLIALSLGLTPNFKSNFDLAEDAKLQLSKDTYDDDLDNLLAQIGDQYADLFLAAKNLSDAILLSDILRVNTEITKAPLSASMIKRYDEHHQDLTLLKALVRQQLPEKYKEIFFDQSKNGYAGYIDGGASQEEFYKFIKPILEKMDGTEELLVKLNREDLLRKQRTFDNGSIPHQIHLGELHAILRRQEDFYPFLKDNREKIEKILTFRIPYYVGPLARGNSRFAWMTRKSEETITPWNFEEVVDKGASAQSFIERMTNFDKNLPNEKVLPKHSLLYEYFTVYNELTKVKYVTEGMRKPAFLSGEQKKAIVDLLFKTNRKVTVKQLKEDYFKKIECFDSVEISGVEDRFNASLGTYHDLLKIIKDKDFLDNEENEDILEDIVLTLTLFEDREMIEERLKTYAHLFDDKVMKQLKRRRYTGWGRLSRKLINGIRDKQSGKTILDFLKSDGFANRNFMQLIHDDSLTFKEDIQKAQVSGQGDSLHEHIANLAGSPAIKKGILQTVKVVDELVKVMGRHKPENIVIEMARENQTTQKGQKNSRERMKRIEEGIKELGSQILKEHPVENTQLQNEKLYLYYLQNGRDMYVDQELDINRLSDYDVDHIVPQSFLKDDSIDNKVLTRSDKNRGKSDNVPSEEVVKKMKNYWRQLLNAKLITQRKFDNLTKAERGGLSELDKAGFIKRQLVETRQITKHVAQILDSRMNTKYDENDKLIREVKVITLKSKLVSDFRKDFQFYKVREINNYHHAHDAYLNAVVGTALIKKYPKLESEFVYGDYKVYDVRKMIAKSEQEIGKATAKYFFYSNIMNFFKTEITLANGEIRKRPLIETNGETGEIVWDKGRDFATVRKVLSMPQVNIVKKTEVQTGGFSKESILPKRNSDKLIARKKDWDPKKYGGFDSPTVAYSVLVVAKVEKGKSKKLKSVKELLGITIMERSSFEKNPIDFLEAKGYKEVKKDLIIKLPKYSLFELENGRKRMLASAGELQKGNELALPSKYVNFLYLASHYEKLKGSPEDNEQKQLFVEQHKHYLDEIIEQISEFSKRVILADANLDKVLSAYNKHRDKPIREQAENIIHLFTLTNLGAPAAFKYFDTTIDRKRYTSTKEVLDATLIHQSITGLYETRIDLSQLGGDAATLERKRKLAVLY

SEQ ID NO: 215 - protein, 1381 aa, synthetic construct
MDKKYSIGLDIGTNSVGWAVITDEYKVPSKKFKVLGNTDRHSIKKNLIGALLFDSGETAEATRLKRTARRRYTRRKNRICYLQEIFSNEMAKVDDSFFHRLEESFLVEEDKKHERHPIFGNIVDEVAYHEKYPTIYHLRKKLVDSTDKADLRLIYLALAHMIKFRGHFLIEGDLNPDNSDVDKLFIQLVQTYNQLFEENPINASGVDAKAILSARLSKSRRLENLIAQLPGEKKNGLFGNLIALSLGLTPNFKSNFDLAEDAKLQLSKDTYDDDLDNLLAQIGDQYADLFLAAKNLSDAILLSDILRVNTEITKAPLSASMIKRYDEHHQDLTLLKALVRQQLPEKYKEIFFDQSKNGYAGYIDGGASQEEFYKFIKPILEKMDGTEELLVKLNREDLLRKQRTFDNGSIPHQIHLGELHAILRRQEDFYPFLKDNREKIEKILTFRIPYYVGPLARGNSRFAWMTRKSEETITPWNFEEVVDKGASAQSFIERMTNFDKNLPNEKVLPKHSLLYEYFTVYNELTKVKYVTEGMRKPAFLSGEQKKAIVDLLFKTNRKVTVKQLKEDYFKKIECFDSVEISGVEDRFNASLGTYHDLLKIIKDKDFLDNEENEDILEDIVLTLTLFEDREMIEERLKTYAHLFDDKVMKQLKRRRYTGWGRLSRKLINGIRDKQSGKTILDFLKSDGFANRNFMQLIHDDSLTFKEDIQKAQVSGQGDSLHEHIANLAGSPAIKKGILQTVKVVDELVKVMGRHKPENIVIEMARENQTTQKGQKNSRERMKRIEEGIKELGSQILKEHPVENTQLQNEKLYLYYLQNGRDMYVDQELDINRLSDYDVDHIVPQSFLKDDSIDNKVLTRSDKNRGKSDNVPSEEVVKKMKNYWRQLLNAKLITQRKFDNLTKAERGGLSELDKAGFIKRQLVETRQITKHVAQILDSRMNTKYDENDKLIREVKVITLKSKLVSDFRKDFQFYKVREINNYHHAHDAYLNAVVGTALIKKYPKLESEFVYGDYKVYDVRKMIAKSEQEIGKATAKYFFYSNIMNFFKTEITLANGEIRKRPLIETNGETGEIVWDKGRDFATVRKVLSMPQVNIVKKTEVQTGGFSKESILPKRNSDKLIARKKDWDPKKYGGFDSPTVAYSVLVVAKVEKGKSKKLKSVKELLGITIMERSSFEKNPIDFLEAKGYKEVKKDLIIKLPKYSLFELENGRKRMLASAGELQKGNELALPSKYVNFLYLASHYEKLKGSPEDNEQKQLFVEQHKHYLDEIIEQISEFSKRVILADANLDKVLSAYNKHRDKPIREQAENIIHLFTLTNLGAPAAFKYFDTTIDRKRYTSTKEVLDATLIHQSITGLYETRIDLSQLGGDAARKRGRKRFRSV

SEQ ID NO: 216 - protein, 1382 aa, synthetic construct
MDKKYSIGLDIGTNSVGWAVITDEYKVPSKKFKVLGNTDRHSIKKNLIGALLFDSGETAEATRLKRTARRRYTRRKNRICYLQEIFSNEMAKVDDSFFHRLEESFLVEEDKKHERHPIFGNIVDEVAYHEKYPTIYHLRKKLVDSTDKADLRLIYLALAHMIKFRGHFLIEGDLNPDNSDVDKLFIQLVQTYNQLFEENPINASGVDAKAILSARLSKSRRLENLIAQLPGEKKNGLFGNLIALSLGLTPNFKSNFDLAEDAKLQLSKDTYDDDLDNLLAQIGDQYADLFLAAKNLSDAILLSDILRVNTEITKAPLSASMIKRYDEHHQDLTLLKALVRQQLPEKYKEIFFDQSKNGYAGYIDGGASQEEFYKFIKPILEKMDGTEELLVKLNREDLLRKQRTFDNGSIPHQIHLGELHAILRRQEDFYPFLKDNREKIEKILTFRIPYYVGPLARGNSRFAWMTRKSEETITPWNFEEVVDKGASAQSFIERMTNFDKNLPNEKVLPKHSLLYEYFTVYNELTKVKYVTEGMRKPAFLSGEQKKAIVDLLFKTNRKVTVKQLKEDYFKKIECFDSVEISGVEDRFNASLGTYHDLLKIIKDKDFLDNEENEDILEDIVLTLTLFEDREMIEERLKTYAHLFDDKVMKQLKRRRYTGWGRLSRKLINGIRDKQSGKTILDFLKSDGFANRNFMQLIHDDSLTFKEDIQKAQVSGQGDSLHEHIANLAGSPAIKKGILQTVKVVDELVKVMGRHKPENIVIEMARENQTTQKGQKNSRERMKRIEEGIKELGSQILKEHPVENTQLQNEKLYLYYLQNGRDMYVDQELDINRLSDYDVDHIVPQSFLKDDSIDNKVLTRSDKNRGKSDNVPSEEVVKKMKNYWRQLLNAKLITQRKFDNLTKAERGGLSELDKAGFIKRQLVETRQITKHVAQILDSRMNTKYDENDKLIREVKVITLKSKLVSDFRKDFQFYKVREINNYHHAHDAYLNAVVGTALIKKYPKLESEFVYGDYKVYDVRKMIAKSEQEIGKATAKYFFYSNIMNFFKTEITLANGEIRKRPLIETNGETGEIVWDKGRDFATVRKVLSMPQVNIVKKTEVQTGGFSKESILPKRNSDKLIARKKDWDPKKYGGFDSPTVAYSVLVVAKVEKGKSKKLKSVKELLGITIMERSSFEKNPIDFLEAKGYKEVKKDLIIKLPKYSLFELENGRKRMLASAGELQKGNELALPSKYVNFLYLASHYEKLKGSPEDNEQKQLFVEQHKHYLDEIIEQISEFSKRVILADANLDKVLSAYNKHRDKPIREQAENIIHLFTLTNLGAPAAFKYFDTTIDRKRYTSTKEVLDATLIHQSITGLYETRIDLSQLGGDAAQRRLLKRKRGSL

SEQ ID NO: 217 - protein, 1382 aa, synthetic construct
MDKKYSIGLDIGTNSVGWAVITDEYKVPSKKFKVLGNTDRHSIKKNLIGALLFDSGETAEATRLKRTARRRYTRRKNRICYLQEIFSNEMAKVDDSFFHRLEESFLVEEDKKHERHPIFGNIVDEVAYHEKYPTIYHLRKKLVDSTDKADLRLIYLALAHMIKFRGHFLIEGDLNPDNSDVDKLFIQLVQTYNQLFEENPINASGVDAKAILSARLSKSRRLENLIAQLPGEKKNGLFGNLIALSLGLTPNFKSNFDLAEDAKLQLSKDTYDDDLDNLLAQIGDQYADLFLAAKNLSDAILLSDILRVNTEITKAPLSASMIKRYDEHHQDLTLLKALVRQQLPEKYKEIFFDQSKNGYAGYIDGGASQEEFYKFIKPILEKMDGTEELLVKLNREDLLRKQRTFDNGSIPHQIHLGELHAILRRQEDFYPFLKDNREKIEKILTFRIPYYVGPLARGNSRFAWMTRKSEETITPWNFEEVVDKGASAQSFIERMTNFDKNLPNEKVLPKHSLLYEYFTVYNELTKVKYVTEGMRKPAFLSGEQKKAIVDLLFKTNRKVTVKQLKEDYFKKIECFDSVEISGVEDRFNASLGTYHDLLKIIKDKDFLDNEENEDILEDIVLTLTLFEDREMIEERLKTYAHLFDDKVMKQLKRRRYTGWGRLSRKLINGIRDKQSGKTILDFLKSDGFANRNFMQLIHDDSLTFKEDIQKAQVSGQGDSLHEHIANLAGSPAIKKGILQTVKVVDELVKVMGRHKPENIVIEMARENQTTQKGQKNSRERMKRIEEGIKELGSQILKEHPVENTQLQNEKLYLYYLQNGRDMYVDQELDINRLSDYDVDHIVPQSFLKDDSIDNKVLTRSDKNRGKSDNVPSEEVVKKMKNYWRQLLNAKLITQRKFDNLTKAERGGLSELDKAGFIKRQLVETRQITKHVAQILDSRMNTKYDENDKLIREVKVITLKSKLVSDFRKDFQFYKVREINNYHHAHDAYLNAVVGTALIKKYPKLESEFVYGDYKVYDVRKMIAKSEQEIGKATAKYFFYSNIMNFFKTEITLANGEIRKRPLIETNGETGEIVWDKGRDFATVRKVLSMPQVNIVKKTEVQTGGFSKESILPKRNSDKLIARKKDWDPKKYGGFDSPTVAYSVLVVAKVEKGKSKKLKSVKELLGITIMERSSFEKNPIDFLEAKGYKEVKKDLIIKLPKYSLFELENGRKRMLASAGELQKGNELALPSKYVNFLYLASHYEKLKGSPEDNEQKQLFVEQHKHYLDEIIEQISEFSKRVILADANLDKVLSAYNKHRDKPIREQAENIIHLFTLTNLGAPAAFKYFDTTIDRKRYTSTKEVLDATLIHQSITGLYETRIDLSQLGGDAAIGRKRGYSVAFG

SEQ ID NO: 218 - protein, 1382 aa, synthetic construct
MDKKYSIGLDIGTNSVGWAVITDEYKVPSKKFKVLGNTDRHSIKKNLIGALLFDSGETAEATRLKRTARRRYTRRKNRICYLQEIFSNEMAKVDDSFFHRLEESFLVEEDKKHERHPIFGNIVDEVAYHEKYPTIYHLRKKLVDSTDKADLRLIYLALAHMIKFRGHFLIEGDLNPDNSDVDKLFIQLVQTYNQLFEENPINASGVDAKAILSARLSKSRRLENLIAQLPGEKKNGLFGNLIALSLGLTPNFKSNFDLAEDAKLQLSKDTYDDDLDNLLAQIGDQYADLFLAAKNLSDAILLSDILRVNTEITKAPLSASMIKRYDEHHQDLTLLKALVRQQLPEKYKEIFFDQSKNGYAGYIDGGASQEEFYKFIKPILEKMDGTEELLVKLNREDLLRKQRTFDNGSIPHQIHLGELHAILRRQEDFYPFLKDNREKIEKILTFRIPYYVGPLARGNSRFAWMTRKSEETITPWNFEEVVDKGASAQSFIERMTNFDKNLPNEKVLPKHSLLYEYFTVYNELTKVKYVTEGMRKPAFLSGEQKKAIVDLLFKTNRKVTVKQLKEDYFKKIECFDSVEISGVEDRFNASLGTYHDLLKIIKDKDFLDNEENEDILEDIVLTLTLFEDREMIEERLKTYAHLFDDKVMKQLKRRRYTGWGRLSRKLINGIRDKQSGKTILDFLKSDGFANRNFMQLIHDDSLTFKEDIQKAQVSGQGDSLHEHIANLAGSPAIKKGILQTVKVVDELVKVMGRHKPENIVIEMARENQTTQKGQKNSRERMKRIEEGIKELGSQILKEHPVENTQLQNEKLYLYYLQNGRDMYVDQELDINRLSDYDVDHIVPQSFLKDDSIDNKVLTRSDKNRGKSDNVPSEEVVKKMKNYWRQLLNAKLITQRKFDNLTKAERGGLSELDKAGFIKRQLVETRQITKHVAQILDSRMNTKYDENDKLIREVKVITLKSKLVSDFRKDFQFYKVREINNYHHAHDAYLNAVVGTALIKKYPKLESEFVYGDYKVYDVRKMIAKSEQEIGKATAKYFFYSNIMNFFKTEITLANGEIRKRPLIETNGETGEIVWDKGRDFATVRKVLSMPQVNIVKKTEVQTGGFSKESILPKRNSDKLIARKKDWDPKKYGGFDSPTVAYSVLVVAKVEKGKSKKLKSVKELLGITIMERSSFEKNPIDFLEAKGYKEVKKDLIIKLPKYSLFELENGRKRMLASAGELQKGNELALPSKYVNFLYLASHYEKLKGSPEDNEQKQLFVEQHKHYLDEIIEQISEFSKRVILADANLDKVLSAYNKHRDKPIREQAENIIHLFTLTNLGAPAAFKYFDTTIDRKRYTSTKEVLDATLIHQSITGLYETRIDLSQLGGDAAKRPYSIAFPLGQ

SEQ ID NO: 219 - protein, 1382 aa, synthetic construct
MDKKYSIGLDIGTNSVGWAVITDEYKVPSKKFKVLGNTDRHSIKKNLIGALLFDSGETAEATRLKRTARRRYTRRKNRICYLQEIFSNEMAKVDDSFFHRLEESFLVEEDKKHERHPIFGNIVDEVAYHEKYPTIYHLRKKLVDSTDKADLRLIYLALAHMIKFRGHFLIEGDLNPDNSDVDKLFIQLVQTYNQLFEENPINASGVDAKAILSARLSKSRRLENLIAQLPGEKKNGLFGNLIALSLGLTPNFKSNFDLAEDAKLQLSKDTYDDDLDNLLAQIGDQYADLFLAAKNLSDAILLSDILRVNTEITKAPLSASMIKRYDEHHQDLTLLKALVRQQLPEKYKEIFFDQSKNGYAGYIDGGASQEEFYKFIKPILEKMDGTEELLVKLNREDLLRKQRTFDNGSIPHQIHLGELHAILRRQEDFYPFLKDNREKIEKILTFRIPYYVGPLARGNSRFAWMTRKSEETITPWNFEEVVDKGASAQSFIERMTNFDKNLPNEKVLPKHSLLYEYFTVYNELTKVKYVTEGMRKPAFLSGEQKKAIVDLLFKTNRKVTVKQLKEDYFKKIECFDSVEISGVEDRFNASLGTYHDLLKIIKDKDFLDNEENEDILEDIVLTLTLFEDREMIEERLKTYAHLFDDKVMKQLKRRRYTGWGRLSRKLINGIRDKQSGKTILDFLKSDGFANRNFMQLIHDDSLTFKEDIQKAQVSGQGDSLHEHIANLAGSPAIKKGILQTVKVVDELVKVMGRHKPENIVIEMARENQTTQKGQKNSRERMKRIEEGIKELGSQILKEHPVENTQLQNEKLYLYYLQNGRDMYVDQELDINRLSDYDVDHIVPQSFLKDDSIDNKVLTRSDKNRGKSDNVPSEEVVKKMKNYWRQLLNAKLITQRKFDNLTKAERGGLSELDKAGFIKRQLVETRQITKHVAQILDSRMNTKYDENDKLIREVKVITLKSKLVSDFRKDFQFYKVREINNYHHAHDAYLNAVVGTALIKKYPKLESEFVYGDYKVYDVRKMIAKSEQEIGKATAKYFFYSNIMNFFKTEITLANGEIRKRPLIETNGETGEIVWDKGRDFATVRKVLSMPQVNIVKKTEVQTGGFSKESILPKRNSDKLIARKKDWDPKKYGGFDSPTVAYSVLVVAKVEKGKSKKLKSVKELLGITIMERSSFEKNPIDFLEAKGYKEVKKDLIIKLPKYSLFELENGRKRMLASAGELQKGNELALPSKYVNFLYLASHYEKLKGSPEDNEQKQLFVEQHKHYLDEIIEQISEFSKRVILADANLDKVLSAYNKHRDKPIREQAENIIHLFTLTNLGAPAAFKYFDTTIDRKRYTSTKEVLDATLIHQSITGLYETRIDLSQLGGDAAITRKRKRDLVFT

SEQ ID NO: 220 - protein, 1380 aa, synthetic construct
MDKKYSIGLDIGTNSVGWAVITDEYKVPSKKFKVLGNTDRHSIKKNLIGALLFDSGETAEATRLKRTARRRYTRRKNRICYLQEIFSNEMAKVDDSFFHRLEESFLVEEDKKHERHPIFGNIVDEVAYHEKYPTIYHLRKKLVDSTDKADLRLIYLALAHMIKFRGHFLIEGDLNPDNSDVDKLFIQLVQTYNQLFEENPINASGVDAKAILSARLSKSRRLENLIAQLPGEKKNGLFGNLIALSLGLTPNFKSNFDLAEDAKLQLSKDTYDDDLDNLLAQIGDQYADLFLAAKNLSDAILLSDILRVNTEITKAPLSASMIKRYDEHHQDLTLLKALVRQQLPEKYKEIFFDQSKNGYAGYIDGGASQEEFYKFIKPILEKMDGTEELLVKLNREDLLRKQRTFDNGSIPHQIHLGELHAILRRQEDFYPFLKDNREKIEKILTFRIPYYVGPLARGNSRFAWMTRKSEETITPWNFEEVVDKGASAQSFIERMTNFDKNLPNEKVLPKHSLLYEYFTVYNELTKVKYVTEGMRKPAFLSGEQKKAIVDLLFKTNRKVTVKQLKEDYFKKIECFDSVEISGVEDRFNASLGTYHDLLKIIKDKDFLDNEENEDILEDIVLTLTLFEDREMIEERLKTYAHLFDDKVMKQLKRRRYTGWGRLSRKLINGIRDKQSGKTILDFLKSDGFANRNFMQLIHDDSLTFKEDIQKAQVSGQGDSLHEHIANLAGSPAIKKGILQTVKVVDELVKVMGRHKPENIVIEMARENQTTQKGQKNSRERMKRIEEGIKELGSQILKEHPVENTQLQNEKLYLYYLQNGRDMYVDQELDINRLSDYDVDHIVPQSFLKDDSIDNKVLTRSDKNRGKSDNVPSEEVVKKMKNYWRQLLNAKLITQRKFDNLTKAERGGLSELDKAGFIKRQLVETRQITKHVAQILDSRMNTKYDENDKLIREVKVITLKSKLVSDFRKDFQFYKVREINNYHHAHDAYLNAVVGTALIKKYPKLESEFVYGDYKVYDVRKMIAKSEQEIGKATAKYFFYSNIMNFFKTEITLANGEIRKRPLIETNGETGEIVWDKGRDFATVRKVLSMPQVNIVKKTEVQTGGFSKESILPKRNSDKLIARKKDWDPKKYGGFDSPTVAYSVLVVAKVEKGKSKKLKSVKELLGITIMERSSFEKNPIDFLEAKGYKEVKKDLIIKLPKYSLFELENGRKRMLASAGELQKGNELALPSKYVNFLYLASHYEKLKGSPEDNEQKQLFVEQHKHYLDEIIEQISEFSKRVILADANLDKVLSAYNKHRDKPIREQAENIIHLFTLTNLGAPAAFKYFDTTIDRKRYTSTKEVLDATLIHQSITGLYETRIDLSQLGGDAAKRTWAQAFTE

SEQ ID NO: 221 - protein, 1382 aa, synthetic construct
MDKKYSIGLDIGTNSVGWAVITDEYKVPSKKFKVLGNTDRHSIKKNLIGALLFDSGETAEATRLKRTARRRYTRRKNRICYLQEIFSNEMAKVDDSFFHRLEESFLVEEDKKHERHPIFGNIVDEVAYHEKYPTIYHLRKKLVDSTDKADLRLIYLALAHMIKFRGHFLIEGDLNPDNSDVDKLFIQLVQTYNQLFEENPINASGVDAKAILSARLSKSRRLENLIAQLPGEKKNGLFGNLIALSLGLTPNFKSNFDLAEDAKLQLSKDTYDDDLDNLLAQIGDQYADLFLAAKNLSDAILLSDILRVNTEITKAPLSASMIKRYDEHHQDLTLLKALVRQQLPEKYKEIFFDQSKNGYAGYIDGGASQEEFYKFIKPILEKMDGTEELLVKLNREDLLRKQRTFDNGSIPHQIHLGELHAILRRQEDFYPFLKDNREKIEKILTFRIPYYVGPLARGNSRFAWMTRKSEETITPWNFEEVVDKGASAQSFIERMTNFDKNLPNEKVLPKHSLLYEYFTVYNELTKVKYVTEGMRKPAFLSGEQKKAIVDLLFKTNRKVTVKQLKEDYFKKIECFDSVEISGVEDRFNASLGTYHDLLKIIKDKDFLDNEENEDILEDIVLTLTLFEDREMIEERLKTYAHLFDDKVMKQLKRRRYTGWGRLSRKLINGIRDKQSGKTILDFLKSDGFANRNFMQLIHDDSLTFKEDIQKAQVSGQGDSLHEHIANLAGSPAIKKGILQTVKVVDELVKVMGRHKPENIVIEMARENQTTQKGQKNSRERMKRIEEGIKELGSQILKEHPVENTQLQNEKLYLYYLQNGRDMYVDQELDINRLSDYDVDHIVPQSFLKDDSIDNKVLTRSDKNRGKSDNVPSEEVVKKMKNYWRQLLNAKLITQRKFDNLTKAERGGLSELDKAGFIKRQLVETRQITKHVAQILDSRMNTKYDENDKLIREVKVITLKSKLVSDFRKDFQFYKVREINNYHHAHDAYLNAVVGTALIKKYPKLESEFVYGDYKVYDVRKMIAKSEQEIGKATAKYFFYSNIMNFFKTEITLANGEIRKRPLIETNGETGEIVWDKGRDFATVRKVLSMPQVNIVKKTEVQTGGFSKESILPKRNSDKLIARKKDWDPKKYGGFDSPTVAYSVLVVAKVEKGKSKKLKSVKELLGITIMERSSFEKNPIDFLEAKGYKEVKKDLIIKLPKYSLFELENGRKRMLASAGELQKGNELALPSKYVNFLYLASHYEKLKGSPEDNEQKQLFVEQHKHYLDEIIEQISEFSKRVILADANLDKVLSAYNKHRDKPIREQAENIIHLFTLTNLGAPAAFKYFDTTIDRKRYTSTKEVLDATLIHQSITGLYETRIDLSQLGGDAAKRRYSDAFRLPV

SEQ ID NO: 222 - protein, 1379 aa, synthetic construct
MDKKYSIGLDIGTNSVGWAVITDEYKVPSKKFKVLGNTDRHSIKKNLIGALLFDSGETAEATRLKRTARRRYTRRKNRICYLQEIFSNEMAKVDDSFFHRLEESFLVEEDKKHERHPIFGNIVDEVAYHEKYPTIYHLRKKLVDSTDKADLRLIYLALAHMIKFRGHFLIEGDLNPDNSDVDKLFIQLVQTYNQLFEENPINASGVDAKAILSARLSKSRRLENLIAQLPGEKKNGLFGNLIALSLGLTPNFKSNFDLAEDAKLQLSKDTYDDDLDNLLAQIGDQYADLFLAAKNLSDAILLSDILRVNTEITKAPLSASMIKRYDEHHQDLTLLKALVRQQLPEKYKEIFFDQSKNGYAGYIDGGASQEEFYKFIKPILEKMDGTEELLVKLNREDLLRKQRTFDNGSIPHQIHLGELHAILRRQEDFYPFLKDNREKIEKILTFRIPYYVGPLARGNSRFAWMTRKSEETITPWNFEEVVDKGASAQSFIERMTNFDKNLPNEKVLPKHSLLYEYFTVYNELTKVKYVTEGMRKPAFLSGEQKKAIVDLLFKTNRKVTVKQLKEDYFKKIECFDSVEISGVEDRFNASLGTYHDLLKIIKDKDFLDNEENEDILEDIVLTLTLFEDREMIEERLKTYAHLFDDKVMKQLKRRRYTGWGRLSRKLINGIRDKQSGKTILDFLKSDGFANRNFMQLIHDDSLTFKEDIQKAQVSGQGDSLHEHIANLAGSPAIKKGILQTVKVVDELVKVMGRHKPENIVIEMARENQTTQKGQKNSRERMKRIEEGIKELGSQILKEHPVENTQLQNEKLYLYYLQNGRDMYVDQELDINRLSDYDVDHIVPQSFLKDDSIDNKVLTRSDKNRGKSDNVPSEEVVKKMKNYWRQLLNAKLITQRKFDNLTKAERGGLSELDKAGFIKRQLVETRQITKHVAQILDSRMNTKYDENDKLIREVKVITLKSKLVSDFRKDFQFYKVREINNYHHAHDAYLNAVVGTALIKKYPKLESEFVYGDYKVYDVRKMIAKSEQEIGKATAKYFFYSNIMNFFKTEITLANGEIRKRPLIETNGETGEIVWDKGRDFATVRKVLSMPQVNIVKKTEVQTGGFSKESILPKRNSDKLIARKKDWDPKKYGGFDSPTVAYSVLVVAKVEKGKSKKLKSVKELLGITIMERSSFEKNPIDFLEAKGYKEVKKDLIIKLPKYSLFELENGRKRMLASAGELQKGNELALPSKYVNFLYLASHYEKLKGSPEDNEQKQLFVEQHKHYLDEIIEQISEFSKRVILADANLDKVLSAYNKHRDKPIREQAENIIHLFTLTNLGAPAAFKYFDTTIDRKRYTSTKEVLDATLIHQSITGLYETRIDLSQLGGDAAKRSWSMAFC

SEQ ID NO: 223 - protein, 1382 aa, synthetic construct
MDKKYSIGLDIGTNSVGWAVITDEYKVPSKKFKVLGNTDRHSIKKNLIGALLFDSGETAEATRLKRTARRRYTRRKNRICYLQEIFSNEMAKVDDSFFHRLEESFLVEEDKKHERHPIFGNIVDEVAYHEKYPTIYHLRKKLVDSTDKADLRLIYLALAHMIKFRGHFLIEGDLNPDNSDVDKLFIQLVQTYNQLFEENPINASGVDAKAILSARLSKSRRLENLIAQLPGEKKNGLFGNLIALSLGLTPNFKSNFDLAEDAKLQLSKDTYDDDLDNLLAQIGDQYADLFLAAKNLSDAILLSDILRVNTEITKAPLSASMIKRYDEHHQDLTLLKALVRQQLPEKYKEIFFDQSKNGYAGYIDGGASQEEFYKFIKPILEKMDGTEELLVKLNREDLLRKQRTFDNGSIPHQIHLGELHAILRRQEDFYPFLKDNREKIEKILTFRIPYYVGPLARGNSRFAWMTRKSEETITPWNFEEVVDKGASAQSFIERMTNFDKNLPNEKVLPKHSLLYEYFTVYNELTKVKYVTEGMRKPAFLSGEQKKAIVDLLFKTNRKVTVKQLKEDYFKKIECFDSVEISGVEDRFNASLGTYHDLLKIIKDKDFLDNEENEDILEDIVLTLTLFEDREMIEERLKTYAHLFDDKVMKQLKRRRYTGWGRLSRKLINGIRDKQSGKTILDFLKSDGFANRNFMQLIHDDSLTFKEDIQKAQVSGQGDSLHEHIANLAGSPAIKKGILQTVKVVDELVKVMGRHKPENIVIEMARENQTTQKGQKNSRERMKRIEEGIKELGSQILKEHPVENTQLQNEKLYLYYLQNGRDMYVDQELDINRLSDYDVDHIVPQSFLKDDSIDNKVLTRSDKNRGKSDNVPSEEVVKKMKNYWRQLLNAKLITQRKFDNLTKAERGGLSELDKAGFIKRQLVETRQITKHVAQILDSRMNTKYDENDKLIREVKVITLKSKLVSDFRKDFQFYKVREINNYHHAHDAYLNAVVGTALIKKYPKLESEFVYGDYKVYDVRKMIAKSEQEIGKATAKYFFYSNIMNFFKTEITLANGEIRKRPLIETNGETGEIVWDKGRDFATVRKVLSMPQVNIVKKTEVQTGGFSKESILPKRNSDKLIARKKDWDPKKYGGFDSPTVAYSVLVVAKVEKGKSKKLKSVKELLGITIMERSSFEKNPIDFLEAKGYKEVKKDLIIKLPKYSLFELENGRKRMLASAGELQKGNELALPSKYVNFLYLASHYEKLKGSPEDNEQKQLFVEQHKHYLDEIIEQISEFSKRVILADANLDKVLSAYNKHRDKPIREQAENIIHLFTLTNLGAPAAFKYFDTTIDRKRYTSTKEVLDATLIHQSITGLYETRIDLSQLGGDAAISRKRKRDLEFV

SEQ ID NO: 224 - protein, 1382 aa, synthetic construct
MDKKYSIGLDIGTNSVGWAVITDEYKVPSKKFKVLGNTDRHSIKKNLIGALLFDSGETAEATRLKRTARRRYTRRKNRICYLQEIFSNEMAKVDDSFFHRLEESFLVEEDKKHERHPIFGNIVDEVAYHEKYPTIYHLRKKLVDSTDKADLRLIYLALAHMIKFRGHFLIEGDLNPDNSDVDKLFIQLVQTYNQLFEENPINASGVDAKAILSARLSKSRRLENLIAQLPGEKKNGLFGNLIALSLGLTPNFKSNFDLAEDAKLQLSKDTYDDDLDNLLAQIGDQYADLFLAAKNLSDAILLSDILRVNTEITKAPLSASMIKRYDEHHQDLTLLKALVRQQLPEKYKEIFFDQSKNGYAGYIDGGASQEEFYKFIKPILEKMDGTEELLVKLNREDLLRKQRTFDNGSIPHQIHLGELHAILRRQEDFYPFLKDNREKIEKILTFRIPYYVGPLARGNSRFAWMTRKSEETITPWNFEEVVDKGASAQSFIERMTNFDKNLPNEKVLPKHSLLYEYFTVYNELTKVKYVTEGMRKPAFLSGEQKKAIVDLLFKTNRKVTVKQLKEDYFKKIECFDSVEISGVEDRFNASLGTYHDLLKIIKDKDFLDNEENEDILEDIVLTLTLFEDREMIEERLKTYAHLFDDKVMKQLKRRRYTGWGRLSRKLINGIRDKQSGKTILDFLKSDGFANRNFMQLIHDDSLTFKEDIQKAQVSGQGDSLHEHIANLAGSPAIKKGILQTVKVVDELVKVMGRHKPENIVIEMARENQTTQKGQKNSRERMKRIEEGIKELGSQILKEHPVENTQLQNEKLYLYYLQNGRDMYVDQELDINRLSDYDVDHIVPQSFLKDDSIDNKVLTRSDKNRGKSDNVPSEEVVKKMKNYWRQLLNAKLITQRKFDNLTKAERGGLSELDKAGFIKRQLVETRQITKHVAQILDSRMNTKYDENDKLIREVKVITLKSKLVSDFRKDFQFYKVREINNYHHAHDAYLNAVVGTALIKKYPKLESEFVYGDYKVYDVRKMIAKSEQEIGKATAKYFFYSNIMNFFKTEITLANGEIRKRPLIETNGETGEIVWDKGRDFATVRKVLSMPQVNIVKKTEVQTGGFSKESILPKRNSDKLIARKKDWDPKKYGGFDSPTVAYSVLVVAKVEKGKSKKLKSVKELLGITIMERSSFEKNPIDFLEAKGYKEVKKDLIIKLPKYSLFELENGRKRMLASAGELQKGNELALPSKYVNFLYLASHYEKLKGSPEDNEQKQLFVEQHKHYLDEIIEQISEFSKRVILADANLDKVLSAYNKHRDKPIREQAENIIHLFTLTNLGAPAAFKYFDTTIDRKRYTSTKEVLDATLIHQSITGLYETRIDLSQLGGDAAIGRKRVWAVAFY

SEQ ID NO: 225 - protein, 1382 aa, synthetic construct
MDKKYSIGLDIGTNSVGWAVITDEYKVPSKKFKVLGNTDRHSIKKNLIGALLFDSGETAEATRLKRTARRRYTRRKNRICYLQEIFSNEMAKVDDSFFHRLEESFLVEEDKKHERHPIFGNIVDEVAYHEKYPTIYHLRKKLVDSTDKADLRLIYLALAHMIKFRGHFLIEGDLNPDNSDVDKLFIQLVQTYNQLFEENPINASGVDAKAILSARLSKSRRLENLIAQLPGEKKNGLFGNLIALSLGLTPNFKSNFDLAEDAKLQLSKDTYDDDLDNLLAQIGDQYADLFLAAKNLSDAILLSDILRVNTEITKAPLSASMIKRYDEHHQDLTLLKALVRQQLPEKYKEIFFDQSKNGYAGYIDGGASQEEFYKFIKPILEKMDGTEELLVKLNREDLLRKQRTFDNGSIPHQIHLGELHAILRRQEDFYPFLKDNREKIEKILTFRIPYYVGPLARGNSRFAWMTRKSEETITPWNFEEVVDKGASAQSFIERMTNFDKNLPNEKVLPKHSLLYEYFTVYNELTKVKYVTEGMRKPAFLSGEQKKAIVDLLFKTNRKVTVKQLKEDYFKKIECFDSVEISGVEDRFNASLGTYHDLLKIIKDKDFLDNEENEDILEDIVLTLTLFEDREMIEERLKTYAHLFDDKVMKQLKRRRYTGWGRLSRKLINGIRDKQSGKTILDFLKSDGFANRNFMQLIHDDSLTFKEDIQKAQVSGQGDSLHEHIANLAGSPAIKKGILQTVKVVDELVKVMGRHKPENIVIEMARENQTTQKGQKNSRERMKRIEEGIKELGSQILKEHPVENTQLQNEKLYLYYLQNGRDMYVDQELDINRLSDYDVDHIVPQSFLKDDSIDNKVLTRSDKNRGKSDNVPSEEVVKKMKNYWRQLLNAKLITQRKFDNLTKAERGGLSELDKAGFIKRQLVETRQITKHVAQILDSRMNTKYDENDKLIREVKVITLKSKLVSDFRKDFQFYKVREINNYHHAHDAYLNAVVGTALIKKYPKLESEFVYGDYKVYDVRKMIAKSEQEIGKATAKYFFYSNIMNFFKTEITLANGEIRKRPLIETNGETGEIVWDKGRDFATVRKVLSMPQVNIVKKTEVQTGGFSKESILPKRNSDKLIARKKDWDPKKYGGFDSPTVAYSVLVVAKVEKGKSKKLKSVKELLGITIMERSSFEKNPIDFLEAKGYKEVKKDLIIKLPKYSLFELENGRKRMLASAGELQKGNELALPSKYVNFLYLASHYEKLKGSPEDNEQKQLFVEQHKHYLDEIIEQISEFSKRVILADANLDKVLSAYNKHRDKPIREQAENIIHLFTLTNLGAPAAFKYFDTTIDRKRYTSTKEVLDATLIHQSITGLYETRIDLSQLGGDAAKRKYSDAFGLPV

SEQ ID NO: 226 - protein, 1380 aa, synthetic construct
MDKKYSIGLDIGTNSVGWAVITDEYKVPSKKFKVLGNTDRHSIKKNLIGALLFDSGETAEATRLKRTARRRYTRRKNRICYLQEIFSNEMAKVDDSFFHRLEESFLVEEDKKHERHPIFGNIVDEVAYHEKYPTIYHLRKKLVDSTDKADLRLIYLALAHMIKFRGHFLIEGDLNPDNSDVDKLFIQLVQTYNQLFEENPINASGVDAKAILSARLSKSRRLENLIAQLPGEKKNGLFGNLIALSLGLTPNFKSNFDLAEDAKLQLSKDTYDDDLDNLLAQIGDQYADLFLAAKNLSDAILLSDILRVNTEITKAPLSASMIKRYDEHHQDLTLLKALVRQQLPEKYKEIFFDQSKNGYAGYIDGGASQEEFYKFIKPILEKMDGTEELLVKLNREDLLRKQRTFDNGSIPHQIHLGELHAILRRQEDFYPFLKDNREKIEKILTFRIPYYVGPLARGNSRFAWMTRKSEETITPWNFEEVVDKGASAQSFIERMTNFDKNLPNEKVLPKHSLLYEYFTVYNELTKVKYVTEGMRKPAFLSGEQKKAIVDLLFKTNRKVTVKQLKEDYFKKIECFDSVEISGVEDRFNASLGTYHDLLKIIKDKDFLDNEENEDILEDIVLTLTLFEDREMIEERLKTYAHLFDDKVMKQLKRRRYTGWGRLSRKLINGIRDKQSGKTILDFLKSDGFANRNFMQLIHDDSLTFKEDIQKAQVSGQGDSLHEHIANLAGSPAIKKGILQTVKVVDELVKVMGRHKPENIVIEMARENQTTQKGQKNSRERMKRIEEGIKELGSQILKEHPVENTQLQNEKLYLYYLQNGRDMYVDQELDINRLSDYDVDHIVPQSFLKDDSIDNKVLTRSDKNRGKSDNVPSEEVVKKMKNYWRQLLNAKLITQRKFDNLTKAERGGLSELDKAGFIKRQLVETRQITKHVAQILDSRMNTKYDENDKLIREVKVITLKSKLVSDFRKDFQFYKVREINNYHHAHDAYLNAVVGTALIKKYPKLESEFVYGDYKVYDVRKMIAKSEQEIGKATAKYFFYSNIMNFFKTEITLANGEIRKRPLIETNGETGEIVWDKGRDFATVRKVLSMPQVNIVKKTEVQTGGFSKESILPKRNSDKLIARKKDWDPKKYGGFDSPTVAYSVLVVAKVEKGKSKKLKSVKELLGITIMERSSFEKNPIDFLEAKGYKEVKKDLIIKLPKYSLFELENGRKRMLASAGELQKGNELALPSKYVNFLYLASHYEKLKGSPEDNEQKQLFVEQHKHYLDEIIEQISEFSKRVILADANLDKVLSAYNKHRDKPIREQAENIIHLFTLTNLGAPAAFKYFDTTIDRKRYTSTKEVLDATLIHQSITGLYETRIDLSQLGGDAAKRKRWENDIP

SEQ ID NO: 227 - protein, 1380 aa, synthetic construct
MDKKYSIGLDIGTNSVGWAVITDEYKVPSKKFKVLGNTDRHSIKKNLIGALLFDSGETAEATRLKRTARRRYTRRKNRICYLQEIFSNEMAKVDDSFFHRLEESFLVEEDKKHERHPIFGNIVDEVAYHEKYPTIYHLRKKLVDSTDKADLRLIYLALAHMIKFRGHFLIEGDLNPDNSDVDKLFIQLVQTYNQLFEENPINASGVDAKAILSARLSKSRRLENLIAQLPGEKKNGLFGNLIALSLGLTPNFKSNFDLAEDAKLQLSKDTYDDDLDNLLAQIGDQYADLFLAAKNLSDAILLSDILRVNTEITKAPLSASMIKRYDEHHQDLTLLKALVRQQLPEKYKEIFFDQSKNGYAGYIDGGASQEEFYKFIKPILEKMDGTEELLVKLNREDLLRKQRTFDNGSIPHQIHLGELHAILRRQEDFYPFLKDNREKIEKILTFRIPYYVGPLARGNSRFAWMTRKSEETITPWNFEEVVDKGASAQSFIERMTNFDKNLPNEKVLPKHSLLYEYFTVYNELTKVKYVTEGMRKPAFLSGEQKKAIVDLLFKTNRKVTVKQLKEDYFKKIECFDSVEISGVEDRFNASLGTYHDLLKIIKDKDFLDNEENEDILEDIVLTLTLFEDREMIEERLKTYAHLFDDKVMKQLKRRRYTGWGRLSRKLINGIRDKQSGKTILDFLKSDGFANRNFMQLIHDDSLTFKEDIQKAQVSGQGDSLHEHIANLAGSPAIKKGILQTVKVVDELVKVMGRHKPENIVIEMARENQTTQKGQKNSRERMKRIEEGIKELGSQILKEHPVENTQLQNEKLYLYYLQNGRDMYVDQELDINRLSDYDVDHIVPQSFLKDDSIDNKVLTRSDKNRGKSDNVPSEEVVKKMKNYWRQLLNAKLITQRKFDNLTKAERGGLSELDKAGFIKRQLVETRQITKHVAQILDSRMNTKYDENDKLIREVKVITLKSKLVSDFRKDFQFYKVREINNYHHAHDAYLNAVVGTALIKKYPKLESEFVYGDYKVYDVRKMIAKSEQEIGKATAKYFFYSNIMNFFKTEITLANGEIRKRPLIETNGETGEIVWDKGRDFATVRKVLSMPQVNIVKKTEVQTGGFSKESILPKRNSDKLIARKKDWDPKKYGGFDSPTVAYSVLVVAKVEKGKSKKLKSVKELLGITIMERSSFEKNPIDFLEAKGYKEVKKDLIIKLPKYSLFELENGRKRMLASAGELQKGNELALPSKYVNFLYLASHYEKLKGSPEDNEQKQLFVEQHKHYLDEIIEQISEFSKRVILADANLDKVLSAYNKHRDKPIREQAENIIHLFTLTNLGAPAAFKYFDTTIDRKRYTSTKEVLDATLIHQSITGLYETRIDLSQLGGDAAKRKRWENNIP

SEQ ID NO: 228 - protein, 1382 aa, synthetic construct
MDKKYSIGLDIGTNSVGWAVITDEYKVPSKKFKVLGNTDRHSIKKNLIGALLFDSGETAEATRLKRTARRRYTRRKNRICYLQEIFSNEMAKVDDSFFHRLEESFLVEEDKKHERHPIFGNIVDEVAYHEKYPTIYHLRKKLVDSTDKADLRLIYLALAHMIKFRGHFLIEGDLNPDNSDVDKLFIQLVQTYNQLFEENPINASGVDAKAILSARLSKSRRLENLIAQLPGEKKNGLFGNLIALSLGLTPNFKSNFDLAEDAKLQLSKDTYDDDLDNLLAQIGDQYADLFLAAKNLSDAILLSDILRVNTEITKAPLSASMIKRYDEHHQDLTLLKALVRQQLPEKYKEIFFDQSKNGYAGYIDGGASQEEFYKFIKPILEKMDGTEELLVKLNREDLLRKQRTFDNGSIPHQIHLGELHAILRRQEDFYPFLKDNREKIEKILTFRIPYYVGPLARGNSRFAWMTRKSEETITPWNFEEVVDKGASAQSFIERMTNFDKNLPNEKVLPKHSLLYEYFTVYNELTKVKYVTEGMRKPAFLSGEQKKAIVDLLFKTNRKVTVKQLKEDYFKKIECFDSVEISGVEDRFNASLGTYHDLLKIIKDKDFLDNEENEDILEDIVLTLTLFEDREMIEERLKTYAHLFDDKVMKQLKRRRYTGWGRLSRKLINGIRDKQSGKTILDFLKSDGFANRNFMQLIHDDSLTFKEDIQKAQVSGQGDSLHEHIANLAGSPAIKKGILQTVKVVDELVKVMGRHKPENIVIEMARENQTTQKGQKNSRERMKRIEEGIKELGSQILKEHPVENTQLQNEKLYLYYLQNGRDMYVDQELDINRLSDYDVDHIVPQSFLKDDSIDNKVLTRSDKNRGKSDNVPSEEVVKKMKNYWRQLLNAKLITQRKFDNLTKAERGGLSELDKAGFIKRQLVETRQITKHVAQILDSRMNTKYDENDKLIREVKVITLKSKLVSDFRKDFQFYKVREINNYHHAHDAYLNAVVGTALIKKYPKLESEFVYGDYKVYDVRKMIAKSEQEIGKATAKYFFYSNIMNFFKTEITLANGEIRKRPLIETNGETGEIVWDKGRDFATVRKVLSMPQVNIVKKTEVQTGGFSKESILPKRNSDKLIARKKDWDPKKYGGFDSPTVAYSVLVVAKVEKGKSKKLKSVKELLGITIMERSSFEKNPIDFLEAKGYKEVKKDLIIKLPKYSLFELENGRKRMLASAGELQKGNELALPSKYVNFLYLASHYEKLKGSPEDNEQKQLFVEQHKHYLDEIIEQISEFSKRVILADANLDKVLSAYNKHRDKPIREQAENIIHLFTLTNLGAPAAFKYFDTTIDRKRYTSTKEVLDATLIHQSITGLYETRIDLSQLGGDAATGGVMKRKRGSV

SEQ ID NO: 229 - protein, 1382 aa, synthetic construct
MDKKYSIGLDIGTNSVGWAVITDEYKVPSKKFKVLGNTDRHSIKKNLIGALLFDSGETAEATRLKRTARRRYTRRKNRICYLQEIFSNEMAKVDDSFFHRLEESFLVEEDKKHERHPIFGNIVDEVAYHEKYPTIYHLRKKLVDSTDKADLRLIYLALAHMIKFRGHFLIEGDLNPDNSDVDKLFIQLVQTYNQLFEENPINASGVDAKAILSARLSKSRRLENLIAQLPGEKKNGLFGNLIALSLGLTPNFKSNFDLAEDAKLQLSKDTYDDDLDNLLAQIGDQYADLFLAAKNLSDAILLSDILRVNTEITKAPLSASMIKRYDEHHQDLTLLKALVRQQLPEKYKEIFFDQSKNGYAGYIDGGASQEEFYKFIKPILEKMDGTEELLVKLNREDLLRKQRTFDNGSIPHQIHLGELHAILRRQEDFYPFLKDNREKIEKILTFRIPYYVGPLARGNSRFAWMTRKSEETITPWNFEEVVDKGASAQSFIERMTNFDKNLPNEKVLPKHSLLYEYFTVYNELTKVKYVTEGMRKPAFLSGEQKKAIVDLLFKTNRKVTVKQLKEDYFKKIECFDSVEISGVEDRFNASLGTYHDLLKIIKDKDFLDNEENEDILEDIVLTLTLFEDREMIEERLKTYAHLFDDKVMKQLKRRRYTGWGRLSRKLINGIRDKQSGKTILDFLKSDGFANRNFMQLIHDDSLTFKEDIQKAQVSGQGDSLHEHIANLAGSPAIKKGILQTVKVVDELVKVMGRHKPENIVIEMARENQTTQKGQKNSRERMKRIEEGIKELGSQILKEHPVENTQLQNEKLYLYYLQNGRDMYVDQELDINRLSDYDVDHIVPQSFLKDDSIDNKVLTRSDKNRGKSDNVPSEEVVKKMKNYWRQLLNAKLITQRKFDNLTKAERGGLSELDKAGFIKRQLVETRQITKHVAQILDSRMNTKYDENDKLIREVKVITLKSKLVSDFRKDFQFYKVREINNYHHAHDAYLNAVVGTALIKKYPKLESEFVYGDYKVYDVRKMIAKSEQEIGKATAKYFFYSNIMNFFKTEITLANGEIRKRPLIETNGETGEIVWDKGRDFATVRKVLSMPQVNIVKKTEVQTGGFSKESILPKRNSDKLIARKKDWDPKKYGGFDSPTVAYSVLVVAKVEKGKSKKLKSVKELLGITIMERSSFEKNPIDFLEAKGYKEVKKDLIIKLPKYSLFELENGRKRMLASAGELQKGNELALPSKYVNFLYLASHYEKLKGSPEDNEQKQLFVEQHKHYLDEIIEQISEFSKRVILADANLDKVLSAYNKHRDKPIREQAENIIHLFTLTNLGAPAAFKYFDTTIDRKRYTSTKEVLDATLIHQSITGLYETRIDLSQLGGDAALPKKRKFSEISS

SEQ ID NO: 230 - protein, 1382 aa, synthetic construct
MDKKYSIGLDIGTNSVGWAVITDEYKVPSKKFKVLGNTDRHSIKKNLIGALLFDSGETAEATRLKRTARRRYTRRKNRICYLQEIFSNEMAKVDDSFFHRLEESFLVEEDKKHERHPIFGNIVDEVAYHEKYPTIYHLRKKLVDSTDKADLRLIYLALAHMIKFRGHFLIEGDLNPDNSDVDKLFIQLVQTYNQLFEENPINASGVDAKAILSARLSKSRRLENLIAQLPGEKKNGLFGNLIALSLGLTPNFKSNFDLAEDAKLQLSKDTYDDDLDNLLAQIGDQYADLFLAAKNLSDAILLSDILRVNTEITKAPLSASMIKRYDEHHQDLTLLKALVRQQLPEKYKEIFFDQSKNGYAGYIDGGASQEEFYKFIKPILEKMDGTEELLVKLNREDLLRKQRTFDNGSIPHQIHLGELHAILRRQEDFYPFLKDNREKIEKILTFRIPYYVGPLARGNSRFAWMTRKSEETITPWNFEEVVDKGASAQSFIERMTNFDKNLPNEKVLPKHSLLYEYFTVYNELTKVKYVTEGMRKPAFLSGEQKKAIVDLLFKTNRKVTVKQLKEDYFKKIECFDSVEISGVEDRFNASLGTYHDLLKIIKDKDFLDNEENEDILEDIVLTLTLFEDREMIEERLKTYAHLFDDKVMKQLKRRRYTGWGRLSRKLINGIRDKQSGKTILDFLKSDGFANRNFMQLIHDDSLTFKEDIQKAQVSGQGDSLHEHIANLAGSPAIKKGILQTVKVVDELVKVMGRHKPENIVIEMARENQTTQKGQKNSRERMKRIEEGIKELGSQILKEHPVENTQLQNEKLYLYYLQNGRDMYVDQELDINRLSDYDVDHIVPQSFLKDDSIDNKVLTRSDKNRGKSDNVPSEEVVKKMKNYWRQLLNAKLITQRKFDNLTKAERGGLSELDKAGFIKRQLVETRQITKHVAQILDSRMNTKYDENDKLIREVKVITLKSKLVSDFRKDFQFYKVREINNYHHAHDAYLNAVVGTALIKKYPKLESEFVYGDYKVYDVRKMIAKSEQEIGKATAKYFFYSNIMNFFKTEITLANGEIRKRPLIETNGETGEIVWDKGRDFATVRKVLSMPQVNIVKKTEVQTGGFSKESILPKRNSDKLIARKKDWDPKKYGGFDSPTVAYSVLVVAKVEKGKSKKLKSVKELLGITIMERSSFEKNPIDFLEAKGYKEVKKDLIIKLPKYSLFELENGRKRMLASAGELQKGNELALPSKYVNFLYLASHYEKLKGSPEDNEQKQLFVEQHKHYLDEIIEQISEFSKRVILADANLDKVLSAYNKHRDKPIREQAENIIHLFTLTNLGAPAAFKYFDTTIDRKRYTSTKEVLDATLIHQSITGLYETRIDLSQLGGDAALSGTKRKRAYFI

SEQ ID NO: 231 - protein, 1382 aa, synthetic construct
MDKKYSIGLDIGTNSVGWAVITDEYKVPSKKFKVLGNTDRHSIKKNLIGALLFDSGETAEATRLKRTARRRYTRRKNRICYLQEIFSNEMAKVDDSFFHRLEESFLVEEDKKHERHPIFGNIVDEVAYHEKYPTIYHLRKKLVDSTDKADLRLIYLALAHMIKFRGHFLIEGDLNPDNSDVDKLFIQLVQTYNQLFEENPINASGVDAKAILSARLSKSRRLENLIAQLPGEKKNGLFGNLIALSLGLTPNFKSNFDLAEDAKLQLSKDTYDDDLDNLLAQIGDQYADLFLAAKNLSDAILLSDILRVNTEITKAPLSASMIKRYDEHHQDLTLLKALVRQQLPEKYKEIFFDQSKNGYAGYIDGGASQEEFYKFIKPILEKMDGTEELLVKLNREDLLRKQRTFDNGSIPHQIHLGELHAILRRQEDFYPFLKDNREKIEKILTFRIPYYVGPLARGNSRFAWMTRKSEETITPWNFEEVVDKGASAQSFIERMTNFDKNLPNEKVLPKHSLLYEYFTVYNELTKVKYVTEGMRKPAFLSGEQKKAIVDLLFKTNRKVTVKQLKEDYFKKIECFDSVEISGVEDRFNASLGTYHDLLKIIKDKDFLDNEENEDILEDIVLTLTLFEDREMIEERLKTYAHLFDDKVMKQLKRRRYTGWGRLSRKLINGIRDKQSGKTILDFLKSDGFANRNFMQLIHDDSLTFKEDIQKAQVSGQGDSLHEHIANLAGSPAIKKGILQTVKVVDELVKVMGRHKPENIVIEMARENQTTQKGQKNSRERMKRIEEGIKELGSQILKEHPVENTQLQNEKLYLYYLQNGRDMYVDQELDINRLSDYDVDHIVPQSFLKDDSIDNKVLTRSDKNRGKSDNVPSEEVVKKMKNYWRQLLNAKLITQRKFDNLTKAERGGLSELDKAGFIKRQLVETRQITKHVAQILDSRMNTKYDENDKLIREVKVITLKSKLVSDFRKDFQFYKVREINNYHHAHDAYLNAVVGTALIKKYPKLESEFVYGDYKVYDVRKMIAKSEQEIGKATAKYFFYSNIMNFFKTEITLANGEIRKRPLIETNGETGEIVWDKGRDFATVRKVLSMPQVNIVKKTEVQTGGFSKESILPKRNSDKLIARKKDWDPKKYGGFDSPTVAYSVLVVAKVEKGKSKKLKSVKELLGITIMERSSFEKNPIDFLEAKGYKEVKKDLIIKLPKYSLFELENGRKRMLASAGELQKGNELALPSKYVNFLYLASHYEKLKGSPEDNEQKQLFVEQHKHYLDEIIEQISEFSKRVILADANLDKVLSAYNKHRDKPIREQAENIIHLFTLTNLGAPAAFKYFDTTIDRKRYTSTKEVLDATLIHQSITGLYETRIDLSQLGGDAAPSRKRKRDHYAV

SEQ ID NO: 232 - protein, 1382 aa, synthetic construct
MDKKYSIGLDIGTNSVGWAVITDEYKVPSKKFKVLGNTDRHSIKKNLIGALLFDSGETAEATRLKRTARRRYTRRKNRICYLQEIFSNEMAKVDDSFFHRLEESFLVEEDKKHERHPIFGNIVDEVAYHEKYPTIYHLRKKLVDSTDKADLRLIYLALAHMIKFRGHFLIEGDLNPDNSDVDKLFIQLVQTYNQLFEENPINASGVDAKAILSARLSKSRRLENLIAQLPGEKKNGLFGNLIALSLGLTPNFKSNFDLAEDAKLQLSKDTYDDDLDNLLAQIGDQYADLFLAAKNLSDAILLSDILRVNTEITKAPLSASMIKRYDEHHQDLTLLKALVRQQLPEKYKEIFFDQSKNGYAGYIDGGASQEEFYKFIKPILEKMDGTEELLVKLNREDLLRKQRTFDNGSIPHQIHLGELHAILRRQEDFYPFLKDNREKIEKILTFRIPYYVGPLARGNSRFAWMTRKSEETITPWNFEEVVDKGASAQSFIERMTNFDKNLPNEKVLPKHSLLYEYFTVYNELTKVKYVTEGMRKPAFLSGEQKKAIVDLLFKTNRKVTVKQLKEDYFKKIECFDSVEISGVEDRFNASLGTYHDLLKIIKDKDFLDNEENEDILEDIVLTLTLFEDREMIEERLKTYAHLFDDKVMKQLKRRRYTGWGRLSRKLINGIRDKQSGKTILDFLKSDGFANRNFMQLIHDDSLTFKEDIQKAQVSGQGDSLHEHIANLAGSPAIKKGILQTVKVVDELVKVMGRHKPENIVIEMARENQTTQKGQKNSRERMKRIEEGIKELGSQILKEHPVENTQLQNEKLYLYYLQNGRDMYVDQELDINRLSDYDVDHIVPQSFLKDDSIDNKVLTRSDKNRGKSDNVPSEEVVKKMKNYWRQLLNAKLITQRKFDNLTKAERGGLSELDKAGFIKRQLVETRQITKHVAQILDSRMNTKYDENDKLIREVKVITLKSKLVSDFRKDFQFYKVREINNYHHAHDAYLNAVVGTALIKKYPKLESEFVYGDYKVYDVRKMIAKSEQEIGKATAKYFFYSNIMNFFKTEITLANGEIRKRPLIETNGETGEIVWDKGRDFATVRKVLSMPQVNIVKKTEVQTGGFSKESILPKRNSDKLIARKKDWDPKKYGGFDSPTVAYSVLVVAKVEKGKSKKLKSVKELLGITIMERSSFEKNPIDFLEAKGYKEVKKDLIIKLPKYSLFELENGRKRMLASAGELQKGNELALPSKYVNFLYLASHYEKLKGSPEDNEQKQLFVEQHKHYLDEIIEQISEFSKRVILADANLDKVLSAYNKHRDKPIREQAENIIHLFTLTNLGAPAAFKYFDTTIDRKRYTSTKEVLDATLIHQSITGLYETRIDLSQLGGDAAEPNPRKRKRSEL

SEQ ID NO: 233 - protein, 1382 aa, synthetic construct
MDKKYSIGLDIGTNSVGWAVITDEYKVPSKKFKVLGNTDRHSIKKNLIGALLFDSGETAEATRLKRTARRRYTRRKNRICYLQEIFSNEMAKVDDSFFHRLEESFLVEEDKKHERHPIFGNIVDEVAYHEKYPTIYHLRKKLVDSTDKADLRLIYLALAHMIKFRGHFLIEGDLNPDNSDVDKLFIQLVQTYNQLFEENPINASGVDAKAILSARLSKSRRLENLIAQLPGEKKNGLFGNLIALSLGLTPNFKSNFDLAEDAKLQLSKDTYDDDLDNLLAQIGDQYADLFLAAKNLSDAILLSDILRVNTEITKAPLSASMIKRYDEHHQDLTLLKALVRQQLPEKYKEIFFDQSKNGYAGYIDGGASQEEFYKFIKPILEKMDGTEELLVKLNREDLLRKQRTFDNGSIPHQIHLGELHAILRRQEDFYPFLKDNREKIEKILTFRIPYYVGPLARGNSRFAWMTRKSEETITPWNFEEVVDKGASAQSFIERMTNFDKNLPNEKVLPKHSLLYEYFTVYNELTKVKYVTEGMRKPAFLSGEQKKAIVDLLFKTNRKVTVKQLKEDYFKKIECFDSVEISGVEDRFNASLGTYHDLLKIIKDKDFLDNEENEDILEDIVLTLTLFEDREMIEERLKTYAHLFDDKVMKQLKRRRYTGWGRLSRKLINGIRDKQSGKTILDFLKSDGFANRNFMQLIHDDSLTFKEDIQKAQVSGQGDSLHEHIANLAGSPAIKKGILQTVKVVDELVKVMGRHKPENIVIEMARENQTTQKGQKNSRERMKRIEEGIKELGSQILKEHPVENTQLQNEKLYLYYLQNGRDMYVDQELDINRLSDYDVDHIVPQSFLKDDSIDNKVLTRSDKNRGKSDNVPSEEVVKKMKNYWRQLLNAKLITQRKFDNLTKAERGGLSELDKAGFIKRQLVETRQITKHVAQILDSRMNTKYDENDKLIREVKVITLKSKLVSDFRKDFQFYKVREINNYHHAHDAYLNAVVGTALIKKYPKLESEFVYGDYKVYDVRKMIAKSEQEIGKATAKYFFYSNIMNFFKTEITLANGEIRKRPLIETNGETGEIVWDKGRDFATVRKVLSMPQVNIVKKTEVQTGGFSKESILPKRNSDKLIARKKDWDPKKYGGFDSPTVAYSVLVVAKVEKGKSKKLKSVKELLGITIMERSSFEKNPIDFLEAKGYKEVKKDLIIKLPKYSLFELENGRKRMLASAGELQKGNELALPSKYVNFLYLASHYEKLKGSPEDNEQKQLFVEQHKHYLDEIIEQISEFSKRVILADANLDKVLSAYNKHRDKPIREQAENIIHLFTLTNLGAPAAFKYFDTTIDRKRYTSTKEVLDATLIHQSITGLYETRIDLSQLGGDAAPILPLKRRRGSP

SEQ ID NO: 234 - protein, 1382 aa, synthetic construct
MDKKYSIGLDIGTNSVGWAVITDEYKVPSKKFKVLGNTDRHSIKKNLIGALLFDSGETAEATRLKRTARRRYTRRKNRICYLQEIFSNEMAKVDDSFFHRLEESFLVEEDKKHERHPIFGNIVDEVAYHEKYPTIYHLRKKLVDSTDKADLRLIYLALAHMIKFRGHFLIEGDLNPDNSDVDKLFIQLVQTYNQLFEENPINASGVDAKAILSARLSKSRRLENLIAQLPGEKKNGLFGNLIALSLGLTPNFKSNFDLAEDAKLQLSKDTYDDDLDNLLAQIGDQYADLFLAAKNLSDAILLSDILRVNTEITKAPLSASMIKRYDEHHQDLTLLKALVRQQLPEKYKEIFFDQSKNGYAGYIDGGASQEEFYKFIKPILEKMDGTEELLVKLNREDLLRKQRTFDNGSIPHQIHLGELHAILRRQEDFYPFLKDNREKIEKILTFRIPYYVGPLARGNSRFAWMTRKSEETITPWNFEEVVDKGASAQSFIERMTNFDKNLPNEKVLPKHSLLYEYFTVYNELTKVKYVTEGMRKPAFLSGEQKKAIVDLLFKTNRKVTVKQLKEDYFKKIECFDSVEISGVEDRFNASLGTYHDLLKIIKDKDFLDNEENEDILEDIVLTLTLFEDREMIEERLKTYAHLFDDKVMKQLKRRRYTGWGRLSRKLINGIRDKQSGKTILDFLKSDGFANRNFMQLIHDDSLTFKEDIQKAQVSGQGDSLHEHIANLAGSPAIKKGILQTVKVVDELVKVMGRHKPENIVIEMARENQTTQKGQKNSRERMKRIEEGIKELGSQILKEHPVENTQLQNEKLYLYYLQNGRDMYVDQELDINRLSDYDVDHIVPQSFLKDDSIDNKVLTRSDKNRGKSDNVPSEEVVKKMKNYWRQLLNAKLITQRKFDNLTKAERGGLSELDKAGFIKRQLVETRQITKHVAQILDSRMNTKYDENDKLIREVKVITLKSKLVSDFRKDFQFYKVREINNYHHAHDAYLNAVVGTALIKKYPKLESEFVYGDYKVYDVRKMIAKSEQEIGKATAKYFFYSNIMNFFKTEITLANGEIRKRPLIETNGETGEIVWDKGRDFATVRKVLSMPQVNIVKKTEVQTGGFSKESILPKRNSDKLIARKKDWDPKKYGGFDSPTVAYSVLVVAKVEKGKSKKLKSVKELLGITIMERSSFEKNPIDFLEAKGYKEVKKDLIIKLPKYSLFELENGRKRMLASAGELQKGNELALPSKYVNFLYLASHYEKLKGSPEDNEQKQLFVEQHKHYLDEIIEQISEFSKRVILADANLDKVLSAYNKHRDKPIREQAENIIHLFTLTNLGAPAAFKYFDTTIDRKRYTSTKEVLDATLIHQSITGLYETRIDLSQLGGDAAQIGKKRKRDYLD

SEQ ID NO: 235 - protein, 1382 aa, synthetic construct
MDKKYSIGLDIGTNSVGWAVITDEYKVPSKKFKVLGNTDRHSIKKNLIGALLFDSGETAEATRLKRTARRRYTRRKNRICYLQEIFSNEMAKVDDSFFHRLEESFLVEEDKKHERHPIFGNIVDEVAYHEKYPTIYHLRKKLVDSTDKADLRLIYLALAHMIKFRGHFLIEGDLNPDNSDVDKLFIQLVQTYNQLFEENPINASGVDAKAILSARLSKSRRLENLIAQLPGEKKNGLFGNLIALSLGLTPNFKSNFDLAEDAKLQLSKDTYDDDLDNLLAQIGDQYADLFLAAKNLSDAILLSDILRVNTEITKAPLSASMIKRYDEHHQDLTLLKALVRQQLPEKYKEIFFDQSKNGYAGYIDGGASQEEFYKFIKPILEKMDGTEELLVKLNREDLLRKQRTFDNGSIPHQIHLGELHAILRRQEDFYPFLKDNREKIEKILTFRIPYYVGPLARGNSRFAWMTRKSEETITPWNFEEVVDKGASAQSFIERMTNFDKNLPNEKVLPKHSLLYEYFTVYNELTKVKYVTEGMRKPAFLSGEQKKAIVDLLFKTNRKVTVKQLKEDYFKKIECFDSVEISGVEDRFNASLGTYHDLLKIIKDKDFLDNEENEDILEDIVLTLTLFEDREMIEERLKTYAHLFDDKVMKQLKRRRYTGWGRLSRKLINGIRDKQSGKTILDFLKSDGFANRNFMQLIHDDSLTFKEDIQKAQVSGQGDSLHEHIANLAGSPAIKKGILQTVKVVDELVKVMGRHKPENIVIEMARENQTTQKGQKNSRERMKRIEEGIKELGSQILKEHPVENTQLQNEKLYLYYLQNGRDMYVDQELDINRLSDYDVDHIVPQSFLKDDSIDNKVLTRSDKNRGKSDNVPSEEVVKKMKNYWRQLLNAKLITQRKFDNLTKAERGGLSELDKAGFIKRQLVETRQITKHVAQILDSRMNTKYDENDKLIREVKVITLKSKLVSDFRKDFQFYKVREINNYHHAHDAYLNAVVGTALIKKYPKLESEFVYGDYKVYDVRKMIAKSEQEIGKATAKYFFYSNIMNFFKTEITLANGEIRKRPLIETNGETGEIVWDKGRDFATVRKVLSMPQVNIVKKTEVQTGGFSKESILPKRNSDKLIARKKDWDPKKYGGFDSPTVAYSVLVVAKVEKGKSKKLKSVKELLGITIMERSSFEKNPIDFLEAKGYKEVKKDLIIKLPKYSLFELENGRKRMLASAGELQKGNELALPSKYVNFLYLASHYEKLKGSPEDNEQKQLFVEQHKHYLDEIIEQISEFSKRVILADANLDKVLSAYNKHRDKPIREQAENIIHLFTLTNLGAPAAFKYFDTTIDRKRYTSTKEVLDATLIHQSITGLYETRIDLSQLGGDAAPSRKRKRESDHI

SEQ ID NO: 236 - protein, 1382 aa, synthetic construct
MDKKYSIGLDIGTNSVGWAVITDEYKVPSKKFKVLGNTDRHSIKKNLIGALLFDSGETAEATRLKRTARRRYTRRKNRICYLQEIFSNEMAKVDDSFFHRLEESFLVEEDKKHERHPIFGNIVDEVAYHEKYPTIYHLRKKLVDSTDKADLRLIYLALAHMIKFRGHFLIEGDLNPDNSDVDKLFIQLVQTYNQLFEENPINASGVDAKAILSARLSKSRRLENLIAQLPGEKKNGLFGNLIALSLGLTPNFKSNFDLAEDAKLQLSKDTYDDDLDNLLAQIGDQYADLFLAAKNLSDAILLSDILRVNTEITKAPLSASMIKRYDEHHQDLTLLKALVRQQLPEKYKEIFFDQSKNGYAGYIDGGASQEEFYKFIKPILEKMDGTEELLVKLNREDLLRKQRTFDNGSIPHQIHLGELHAILRRQEDFYPFLKDNREKIEKILTFRIPYYVGPLARGNSRFAWMTRKSEETITPWNFEEVVDKGASAQSFIERMTNFDKNLPNEKVLPKHSLLYEYFTVYNELTKVKYVTEGMRKPAFLSGEQKKAIVDLLFKTNRKVTVKQLKEDYFKKIECFDSVEISGVEDRFNASLGTYHDLLKIIKDKDFLDNEENEDILEDIVLTLTLFEDREMIEERLKTYAHLFDDKVMKQLKRRRYTGWGRLSRKLINGIRDKQSGKTILDFLKSDGFANRNFMQLIHDDSLTFKEDIQKAQVSGQGDSLHEHIANLAGSPAIKKGILQTVKVVDELVKVMGRHKPENIVIEMARENQTTQKGQKNSRERMKRIEEGIKELGSQILKEHPVENTQLQNEKLYLYYLQNGRDMYVDQELDINRLSDYDVDHIVPQSFLKDDSIDNKVLTRSDKNRGKSDNVPSEEVVKKMKNYWRQLLNAKLITQRKFDNLTKAERGGLSELDKAGFIKRQLVETRQITKHVAQILDSRMNTKYDENDKLIREVKVITLKSKLVSDFRKDFQFYKVREINNYHHAHDAYLNAVVGTALIKKYPKLESEFVYGDYKVYDVRKMIAKSEQEIGKATAKYFFYSNIMNFFKTEITLANGEIRKRPLIETNGETGEIVWDKGRDFATVRKVLSMPQVNIVKKTEVQTGGFSKESILPKRNSDKLIARKKDWDPKKYGGFDSPTVAYSVLVVAKVEKGKSKKLKSVKELLGITIMERSSFEKNPIDFLEAKGYKEVKKDLIIKLPKYSLFELENGRKRMLASAGELQKGNELALPSKYVNFLYLASHYEKLKGSPEDNEQKQLFVEQHKHYLDEIIEQISEFSKRVILADANLDKVLSAYNKHRDKPIREQAENIIHLFTLTNLGAPAAFKYFDTTIDRKRYTSTKEVLDATLIHQSITGLYETRIDLSQLGGDAAKRGKRKRLVRPW

SEQ ID NO: 237 - protein, 1382 aa, synthetic construct
MDKKYSIGLDIGTNSVGWAVITDEYKVPSKKFKVLGNTDRHSIKKNLIGALLFDSGETAEATRLKRTARRRYTRRKNRICYLQEIFSNEMAKVDDSFFHRLEESFLVEEDKKHERHPIFGNIVDEVAYHEKYPTIYHLRKKLVDSTDKADLRLIYLALAHMIKFRGHFLIEGDLNPDNSDVDKLFIQLVQTYNQLFEENPINASGVDAKAILSARLSKSRRLENLIAQLPGEKKNGLFGNLIALSLGLTPNFKSNFDLAEDAKLQLSKDTYDDDLDNLLAQIGDQYADLFLAAKNLSDAILLSDILRVNTEITKAPLSASMIKRYDEHHQDLTLLKALVRQQLPEKYKEIFFDQSKNGYAGYIDGGASQEEFYKFIKPILEKMDGTEELLVKLNREDLLRKQRTFDNGSIPHQIHLGELHAILRRQEDFYPFLKDNREKIEKILTFRIPYYVGPLARGNSRFAWMTRKSEETITPWNFEEVVDKGASAQSFIERMTNFDKNLPNEKVLPKHSLLYEYFTVYNELTKVKYVTEGMRKPAFLSGEQKKAIVDLLFKTNRKVTVKQLKEDYFKKIECFDSVEISGVEDRFNASLGTYHDLLKIIKDKDFLDNEENEDILEDIVLTLTLFEDREMIEERLKTYAHLFDDKVMKQLKRRRYTGWGRLSRKLINGIRDKQSGKTILDFLKSDGFANRNFMQLIHDDSLTFKEDIQKAQVSGQGDSLHEHIANLAGSPAIKKGILQTVKVVDELVKVMGRHKPENIVIEMARENQTTQKGQKNSRERMKRIEEGIKELGSQILKEHPVENTQLQNEKLYLYYLQNGRDMYVDQELDINRLSDYDVDHIVPQSFLKDDSIDNKVLTRSDKNRGKSDNVPSEEVVKKMKNYWRQLLNAKLITQRKFDNLTKAERGGLSELDKAGFIKRQLVETRQITKHVAQILDSRMNTKYDENDKLIREVKVITLKSKLVSDFRKDFQFYKVREINNYHHAHDAYLNAVVGTALIKKYPKLESEFVYGDYKVYDVRKMIAKSEQEIGKATAKYFFYSNIMNFFKTEITLANGEIRKRPLIETNGETGEIVWDKGRDFATVRKVLSMPQVNIVKKTEVQTGGFSKESILPKRNSDKLIARKKDWDPKKYGGFDSPTVAYSVLVVAKVEKGKSKKLKSVKELLGITIMERSSFEKNPIDFLEAKGYKEVKKDLIIKLPKYSLFELENGRKRMLASAGELQKGNELALPSKYVNFLYLASHYEKLKGSPEDNEQKQLFVEQHKHYLDEIIEQISEFSKRVILADANLDKVLSAYNKHRDKPIREQAENIIHLFTLTNLGAPAAFKYFDTTIDRKRYTSTKEVLDATLIHQSITGLYETRIDLSQLGGDAARSSGILGKRKFE

SEQ ID NO: 238 - protein, 1386 aa, synthetic construct
MDKKYSIGLDIGTNSVGWAVITDEYKVPSKKFKVLGNTDRHSIKKNLIGALLFDSGETAEATRLKRTARRRYTRRKNRICYLQEIFSNEMAKVDDSFFHRLEESFLVEEDKKHERHPIFGNIVDEVAYHEKYPTIYHLRKKLVDSTDKADLRLIYLALAHMIKFRGHFLIEGDLNPDNSDVDKLFIQLVQTYNQLFEENPINASGVDAKAILSARLSKSRRLENLIAQLPGEKKNGLFGNLIALSLGLTPNFKSNFDLAEDAKLQLSKDTYDDDLDNLLAQIGDQYADLFLAAKNLSDAILLSDILRVNTEITKAPLSASMIKRYDEHHQDLTLLKALVRQQLPEKYKEIFFDQSKNGYAGYIDGGASQEEFYKFIKPILEKMDGTEELLVKLNREDLLRKQRTFDNGSIPHQIHLGELHAILRRQEDFYPFLKDNREKIEKILTFRIPYYVGPLARGNSRFAWMTRKSEETITPWNFEEVVDKGASAQSFIERMTNFDKNLPNEKVLPKHSLLYEYFTVYNELTKVKYVTEGMRKPAFLSGEQKKAIVDLLFKTNRKVTVKQLKEDYFKKIECFDSVEISGVEDRFNASLGTYHDLLKIIKDKDFLDNEENEDILEDIVLTLTLFEDREMIEERLKTYAHLFDDKVMKQLKRRRYTGWGRLSRKLINGIRDKQSGKTILDFLKSDGFANRNFMQLIHDDSLTFKEDIQKAQVSGQGDSLHEHIANLAGSPAIKKGILQTVKVVDELVKVMGRHKPENIVIEMARENQTTQKGQKNSRERMKRIEEGIKELGSQILKEHPVENTQLQNEKLYLYYLQNGRDMYVDQELDINRLSDYDVDHIVPQSFLKDDSIDNKVLTRSDKNRGKSDNVPSEEVVKKMKNYWRQLLNAKLITQRKFDNLTKAERGGLSELDKAGFIKRQLVETRQITKHVAQILDSRMNTKYDENDKLIREVKVITLKSKLVSDFRKDFQFYKVREINNYHHAHDAYLNAVVGTALIKKYPKLESEFVYGDYKVYDVRKMIAKSEQEIGKATAKYFFYSNIMNFFKTEITLANGEIRKRPLIETNGETGEIVWDKGRDFATVRKVLSMPQVNIVKKTEVQTGGFSKESILPKRNSDKLIARKKDWDPKKYGGFDSPTVAYSVLVVAKVEKGKSKKLKSVKELLGITIMERSSFEKNPIDFLEAKGYKEVKKDLIIKLPKYSLFELENGRKRMLASAGELQKGNELALPSKYVNFLYLASHYEKLKGSPEDNEQKQLFVEQHKHYLDEIIEQISEFSKRVILADANLDKVLSAYNKHRDKPIREQAENIIHLFTLTNLGAPAAFKYFDTTIDRKRYTSTKEVLDATLIHQSITGLYETRIDLSQLGGDAAKRPSATVHLCPVPRKR

SEQ ID NO: 239 - protein, 1382 aa, synthetic construct
MDKKYSIGLDIGTNSVGWAVITDEYKVPSKKFKVLGNTDRHSIKKNLIGALLFDSGETAEATRLKRTARRRYTRRKNRICYLQEIFSNEMAKVDDSFFHRLEESFLVEEDKKHERHPIFGNIVDEVAYHEKYPTIYHLRKKLVDSTDKADLRLIYLALAHMIKFRGHFLIEGDLNPDNSDVDKLFIQLVQTYNQLFEENPINASGVDAKAILSARLSKSRRLENLIAQLPGEKKNGLFGNLIALSLGLTPNFKSNFDLAEDAKLQLSKDTYDDDLDNLLAQIGDQYADLFLAAKNLSDAILLSDILRVNTEITKAPLSASMIKRYDEHHQDLTLLKALVRQQLPEKYKEIFFDQSKNGYAGYIDGGASQEEFYKFIKPILEKMDGTEELLVKLNREDLLRKQRTFDNGSIPHQIHLGELHAILRRQEDFYPFLKDNREKIEKILTFRIPYYVGPLARGNSRFAWMTRKSEETITPWNFEEVVDKGASAQSFIERMTNFDKNLPNEKVLPKHSLLYEYFTVYNELTKVKYVTEGMRKPAFLSGEQKKAIVDLLFKTNRKVTVKQLKEDYFKKIECFDSVEISGVEDRFNASLGTYHDLLKIIKDKDFLDNEENEDILEDIVLTLTLFEDREMIEERLKTYAHLFDDKVMKQLKRRRYTGWGRLSRKLINGIRDKQSGKTILDFLKSDGFANRNFMQLIHDDSLTFKEDIQKAQVSGQGDSLHEHIANLAGSPAIKKGILQTVKVVDELVKVMGRHKPENIVIEMARENQTTQKGQKNSRERMKRIEEGIKELGSQILKEHPVENTQLQNEKLYLYYLQNGRDMYVDQELDINRLSDYDVDHIVPQSFLKDDSIDNKVLTRSDKNRGKSDNVPSEEVVKKMKNYWRQLLNAKLITQRKFDNLTKAERGGLSELDKAGFIKRQLVETRQITKHVAQILDSRMNTKYDENDKLIREVKVITLKSKLVSDFRKDFQFYKVREINNYHHAHDAYLNAVVGTALIKKYPKLESEFVYGDYKVYDVRKMIAKSEQEIGKATAKYFFYSNIMNFFKTEITLANGEIRKRPLIETNGETGEIVWDKGRDFATVRKVLSMPQVNIVKKTEVQTGGFSKESILPKRNSDKLIARKKDWDPKKYGGFDSPTVAYSVLVVAKVEKGKSKKLKSVKELLGITIMERSSFEKNPIDFLEAKGYKEVKKDLIIKLPKYSLFELENGRKRMLASAGELQKGNELALPSKYVNFLYLASHYEKLKGSPEDNEQKQLFVEQHKHYLDEIIEQISEFSKRVILADANLDKVLSAYNKHRDKPIREQAENIIHLFTLTNLGAPAAFKYFDTTIDRKRYTSTKEVLDATLIHQSITGLYETRIDLSQLGGDAALGKRYDRDWDYK

SEQ ID NO: 240 - DNA, 4134 bp, synthetic construct
  source 1..4134: mol_type = other DNA
atggacaaaaagtactctattggcctggatatcgggaccaacagcgtcgggtgggctgttatcaccgacgagtataaagtaccttcgaaaaagttcaaagtgctgggcaacaccgatcgccattcaatcaaaaagaacttgattggtgcgctgttgtttgactccggggaaaccgccgaggcgactcgccttaaacgtacagcacgtcgccggtacactcggcgtaagaatcgcatttgctatttgcaggaaatctttagcaacgagatggcaaaagtcgatgactcgtttttccaccgcctcgaggaaagctttctggtggaggaagacaaaaagcatgagcgtcacccgatcttcggcaacattgtcgatgaagtagcgtatcatgaaaaatacccaaccatttaccacttacgcaaaaagctggtggacagcactgacaaagctgatttgcgccttatctatttagccctggcacatatgattaagtttcgtggtcacttcctgatcgaaggagacttaaatcccgacaacagtgatgttgataaattgtttattcagcttgtccaaacttacaatcaactgttcgaggaaaacccgatcaatgcctccggtgtggatgcaaaagccattttaagtgcacgccttagcaagtcccgtcgcttagaaaaccttatcgcgcagctgcccggcgagaaaaagaatggtttgtttgggaaccttattgccttgagcttaggcctcaccccgaatttcaaaagtaatttcgatcttgcagaagacgccaaattacaactgtcgaaggatacttatgatgacgatctcgataatctgttagcgcagattggtgaccaatacgccgatctttttctggcggctaaaaatctgagcgacgccatcttgctttcggatattctccgcgttaacaccgaaatcacgaaagcgcctcttagtgccagcatgattaaacgttatgatgaacaccaccaggacctgaccttactcaaagcgttggttcgccagcaactgccagagaagtacaaagaaatcttctttgatcagtcaaagaatggttatgccggctatattgacgggggtgcaagccaagaggaattctacaaatttatcaagcctattctggagaaaatggatggcaccgaagagttattggtgaagcttaaccgtgaagacctcctgcggaaacagcgcacattcgataatggttcgatcccacaccaaatccatttgggggagttacacgctattttgcgtcgccaggaagacttttaccctttcctgaaggataaccgggagaaaattgagaagatccttacctttcgtattccgtattacgtaggccccttagcacggggtaatagccgtttcgcgtggatgacacggaagtcggaagagacgatcaccccgtggaacttcgaagaggtagtcgacaagggcgcatcagcgcagtcttttattgaacgtatgacgaatttcgataaaaacttgcccaatgagaaggtgcttccgaaacattccttgttatatgaatattttacagtttacaacgagctgaccaaggttaaatacgtgacggaaggaatgcgcaagcccgcttttcttagcggtgagcaaaaaaaggcgatcgtcgacctgttattcaaaacgaatcgtaaggtgactgtaaagcaactcaaagaagattacttcaaaaagattgagtgcttcgacagcgtcgaaatctctggggtagaggatcggtttaacgcaagtttaggtacctaccatgacctgcttaaaatcattaaggataaagacttcttagataatgaagagaacgaagatattctcgaggacatcgtcttgacgttaaccttatttgaggatcgtgaaatgattgaggaacgcctcaaaacttatgcccacctgttcgacgataaggtgatgaagcagctgaaacgtcggcgctacacaggatggggccgcttgagtcgcaaacttattaacggaatccgtgacaagcaatccggcaaaacgattctggatttcttgaagtcggacggatttgctaatcgcaacttcatgcagttgatccatgatgactccctgacttttaaagaggatattcaaaaggcgcaggttagtggtcaaggcgacagcttacacgaacacatcgcaaatttggctggttcgccggccattaaaaaggggatcctccagaccgtgaaagttgtagatgagcttgttaaggtcatgggtcgtcataagcccgaaaacatcgtgattgaaatggcgcgggagaatcaaacgacccagaaaggacaaaagaatagccgtgaacggatgaagcggatcgaggaaggcattaaagagctggggtctcaaatcttgaaggaacaccctgtggagaacactcagctccaaaatgaaaaactttacctgtactatttgcagaacggacgcgatatgtacgtggaccaagagttggatattaatcggctgagtgactacgacgttgatcatatcgtcccgcagagcttcctcaaagacgattctattgacaataaggtactgacgcgctctgataaaaaccgtggtaagtcggacaacgtgccctccgaagaggttgtgaaaaagatgaaaaattattggcgccagcttttaaacgcgaagctgatcacacaacgtaaattcgataatttgaccaaggctgaacggggtggcctgagcgagttagataaggcaggatttattaaacgccagttagtggagactcgtcaaatcaccaaacatgtcgcgcagattttggacagccggatgaacaccaagtacgatgaaaatgacaaactgatccgtgaggtgaaagtcattactctgaagtccaaattagttagtgatttccggaaggactttcaattctacaaagtccgtgaaattaataactatcatcacgcacatgacgcgtacctgaatgcagtggttgggaccgcccttatcaagaaatatcctaagctggagtcggagtttgtctatggcgactataaggtatacgatgttcgcaaaatgattgcgaaatctgagcaggagatcggtaaggcaaccgcaaaatatttcttttactcaaacattatgaatttctttaagacagaaatcactctggccaacggggagattcgcaaacgtccgttgatcgaaacaaacggcgagactggcgaaattgtttgggacaaagggcgtgatttcgcgacggtgcgcaaggtactgagcatgcctcaagtcaatattgttaagaaaaccgaagtgcagacgggcgggttttccaaggaaagcatcttacccaaacgtaattcagataaacttattgcacgcaaaaaggactgggatccgaaaaagtatggaggcttcgacagtccaaccgtagcctactctgttctcgttgtagcgaaagtagaaaagggtaaatccaagaaactgaaatctgtcaaggagttgcttggaatcaccattatggagcgtagctccttcgagaagaacccgattgactttctggaagccaaaggatataaagaggtcaagaaagatcttatcattaagctgcctaagtattcactcttcgagctggaaaatggtcgtaaacgcatgctcgcttctgccggcgagttgcagaagggcaatgaattagcacttccatcaaagtacgttaacttcctgtatttggccagccattacgagaaactgaaggggtctccagaggacaacgaacagaaacaattatttgtagagcagcacaagcattatcttgatgaaatcattgagcaaatttccgaattcagtaaacgcgtaatcctggccgatgcaaacctcgacaaggtgctgagcgcttacaataagcatcgcgacaaacctatccgtgagcaggctgaaaatatcattcacctgttcacattaacgaacctgggcgctccggccgcttttaaatatttcgacacgacaatcgaccgtaagcgctataccagtacgaaagaagtgttggatgcgacccttattcaccagtcaattacaggattatatgagacccgtatcgaccttagccaattaggtggggatgcggcccccaagaaaaagcggaaggtgtga

SEQ ID NO: 241 - DNA, 4164 bp, synthetic construct
  source 1..4164: mol_type = other DNA
atggacaaaaagtactctattggcctggatatcgggaccaacagcgtcgggtgggctgttatcaccgacgagtataaagtaccttcgaaaaagttcaaagtgctgggcaacaccgatcgccattcaatcaaaaagaacttgattggtgcgctgttgtttgactccggggaaaccgccgaggcgactcgccttaaacgtacagcacgtcgccggtacactcggcgtaagaatcgcatttgctatttgcaggaaatctttagcaacgagatggcaaaagtcgatgactcgtttttccaccgcctcgaggaaagctttctggtggaggaagacaaaaagcatgagcgtcacccgatcttcggcaacattgtcgatgaagtagcgtatcatgaaaaatacccaaccatttaccacttacgcaaaaagctggtggacagcactgacaaagctgatttgcgccttatctatttagccctggcacatatgattaagtttcgtggtcacttcctgatcgaaggagacttaaatcccgacaacagtgatgttgataaattgtttattcagcttgtccaaacttacaatcaactgttcgaggaaaacccgatcaatgcctccggtgtggatgcaaaagccattttaagtgcacgccttagcaagtcccgtcgcttagaaaaccttatcgcgcagctgcccggcgagaaaaagaatggtttgtttgggaaccttattgccttgagcttaggcctcaccccgaatttcaaaagtaatttcgatcttgcagaagacgccaaattacaactgtcgaaggatacttatgatgacgatctcgataatctgttagcgcagattggtgaccaatacgccgatctttttctggcggctaaaaatctgagcgacgccatcttgctttcggatattctccgcgttaacaccgaaatcacgaaagcgcctcttagtgccagcatgattaaacgttatgatgaacaccaccaggacctgaccttactcaaagcgttggttcgccagcaactgccagagaagtacaaagaaatcttctttgatcagtcaaagaatggttatgccggctatattgacgggggtgcaagccaagaggaattctacaaatttatcaagcctattctggagaaaatggatggcaccgaagagttattggtgaagcttaaccgtgaagacctcctgcggaaacagcgcacattcgataatggttcgatcccacaccaaatccatttgggggagttacacgctattttgcgtcgccaggaagacttttaccctttcctgaaggataaccgggagaaaattgagaagatccttacctttcgtattccgtattacgtaggccccttagcacggggtaatagccgtttcgcgtggatgacacggaagtcggaagagacgatcaccccgtggaacttcgaagaggtagtcgacaagggcgcatcagcgcagtcttttattgaacgtatgacgaatttcgataaaaacttgcccaatgagaaggtgcttccgaaacattccttgttatatgaatattttacagtttacaacgagctgaccaaggttaaatacgtgacggaaggaatgcgcaagcccgcttttcttagcggtgagcaaaaaaaggcgatcgtcgacctgttattcaaaacgaatcgtaaggtgactgtaaagcaactcaaagaagattacttcaaaaagattgagtgcttcgacagcgtcgaaatctctggggtagaggatcggtttaacgcaagtttaggtacctaccatgacctgcttaaaatcattaaggataaagacttcttagataatgaagagaacgaagatattctcgaggacatcgtcttgacgttaaccttatttgaggatcgtgaaatgattgaggaacgcctcaaaacttatgcccacctgttcgacgataaggtgatgaagcagctgaaacgtcggcgctacacaggatggggccgcttgagtcgcaaacttattaacggaatccgtgacaagcaatccggcaaaacgattctggatttcttgaagtcggacggatttgctaatcgcaacttcatgcagttgatccatgatgactccctgacttttaaagaggatattcaaaaggcgcaggttagtggtcaaggcgacagcttacacgaacacatcgcaaatttggctggttcgccggccattaaaaaggggatcctccagaccgtgaaagttgtagatgagcttgttaaggtcatgggtcgtcataagcccgaaaacatcgtgattgaaatggcgcgggagaatcaaacgacccagaaaggacaaaagaatagccgtgaacggatgaagcggatcgaggaaggcattaaagagctggggtctcaaatcttgaaggaacaccctgtggagaacactcagctccaaaatgaaaaactttacctgtactatttgcagaacggacgcgatatgtacgtggaccaagagttggatattaatcggctgagtgactacgacgttgatcatatcgtcccgcagagcttcctcaaagacgattctattgacaataaggtactgacgcgctctgataaaaaccgtggtaagtcggacaacgtgccctccgaagaggttgtgaaaaagatgaaaaattattggcgccagcttttaaacgcgaagctgatcacacaacgtaaattcgataatttgaccaaggctgaacggggtggcctgagcgagttagataaggcaggatttattaaacgccagttagtggagactcgtcaaatcaccaaacatgtcgcgcagattttggacagccggatgaacaccaagtacgatgaaaatgacaaactgatccgtgaggtgaaagtcattactctgaagtccaaattagttagtgatttccggaaggactttcaattctacaaagtccgtgaaattaataactatcatcacgcacatgacgcgtacctgaatgcagtggttgggaccgcccttatcaagaaatatcctaagctggagtcggagtttgtctatggcgactataaggtatacgatgttcgcaaaatgattgcgaaatctgagcaggagatcggtaaggcaaccgcaaaatatttcttttactcaaacattatgaatttctttaagacagaaatcactctggccaacggggagattcgcaaacgtccgttgatcgaaacaaacggcgagactggcgaaattgtttgggacaaagggcgtgatttcgcgacggtgcgcaaggtactgagcatgcctcaagtcaatattgttaagaaaaccgaagtgcagacgggcgggttttccaaggaaagcatcttacccaaacgtaattcagataaacttattgcacgcaaaaaggactgggatccgaaaaagtatggaggcttcgacagtccaaccgtagcctactctgttctcgttgtagcgaaagtagaaaagggtaaatccaagaaactgaaatctgtcaaggagttgcttggaatcaccattatggagcgtagctccttcgagaagaacccgattgactttctggaagccaaaggatataaagaggtcaagaaagatcttatcattaagctgcctaagtattcactcttcgagctggaaaatggtcgtaaacgcatgctcgcttctgccggcgagttgcagaagggcaatgaattagcacttccatcaaagtacgttaacttcctgtatttggccagccattacgagaaactgaaggggtctccagaggacaacgaacagaaacaattatttgtagagcagcacaagcattatcttgatgaaatcattgagcaaatttccgaattcagtaaacgcgtaatcctggccgatgcaaacctcgacaaggtgctgagcgcttacaataagcatcgcgacaaacctatccgtgagcaggctgaaaatatcattcacctgttcacattaacgaacctgggcgctccggccgcttttaaatatttcgacacgacaatcgaccgtaagcgctataccagtacgaaagaagtgttggatgcgacccttattcaccagtcaattacaggattatatgagacccgtatcgaccttagccaattaggtggggatgcggccaagagaaagaacagcgccaccgtgcacctgtgtcctgtgcctagaaagagatga

SEQ ID NO: 242 - DNA, 4170 bp, synthetic construct
  source 1..4170: mol_type = other DNA
atggacaaaaagtactctattggcctggatatcgggaccaacagcgtcgggtgggctgttatcaccgacgagtataaagtaccttcgaaaaagttcaaagtgctgggcaacaccgatcgccattcaatcaaaaagaacttgattggtgcgctgttgtttgactccggggaaaccgccgaggcgactcgccttaaacgtacagcacgtcgccggtacactcggcgtaagaatcgcatttgctatttgcaggaaatctttagcaacgagatggcaaaagtcgatgactcgtttttccaccgcctcgaggaaagctttctggtggaggaagacaaaaagcatgagcgtcacccgatcttcggcaacattgtcgatgaagtagcgtatcatgaaaaatacccaaccatttaccacttacgcaaaaagctggtggacagcactgacaaagctgatttgcgccttatctatttagccctggcacatatgattaagtttcgtggtcacttcctgatcgaaggagacttaaatcccgacaacagtgatgttgataaattgtttattcagcttgtccaaacttacaatcaactgttcgaggaaaacccgatcaatgcctccggtgtggatgcaaaagccattttaagtgcacgccttagcaagtcccgtcgcttagaaaaccttatcgcgcagctgcccggcgagaaaaagaatggtttgtttgggaaccttattgccttgagcttaggcctcaccccgaatttcaaaagtaatttcgatcttgcagaagacgccaaattacaactgtcgaaggatacttatgatgacgatctcgataatctgttagcgcagattggtgaccaatacgccgatctttttctggcggctaaaaatctgagcgacgccatcttgctttcggatattctccgcgttaacaccgaaatcacgaaagcgcctcttagtgccagcatgattaaacgttatgatgaacaccaccaggacctgaccttactcaaagcgttggttcgccagcaactgccagagaagtacaaagaaatcttctttgatcagtcaaagaatggttatgccggctatattgacgggggtgcaagccaagaggaattctacaaatttatcaagcctattctggagaaaatggatggcaccgaagagttattggtgaagcttaaccgtgaagacctcctgcggaaacagcgcacattcgataatggttcgatcccacaccaaatccatttgggggagttacacgctattttgcgtcgccaggaagacttttaccctttcctgaaggataaccgggagaaaattgagaagatccttacctttcgtattccgtattacgtaggccccttagcacggggtaatagccgtttcgcgtggatgacacggaagtcggaagagacgatcaccccgtggaacttcgaagaggtagtcgacaagggcgcatcagcgcagtcttttattgaacgtatgacgaatttcgataaaaacttgcccaatgagaaggtgcttccgaaacattccttgttatatgaatattttacagtttacaacgagctgaccaaggttaaatacgtgacggaaggaatgcgcaagcccgcttttcttagcggtgagcaaaaaaaggcgatcgtcgacctgttattcaaaacgaatcgtaaggtgactgtaaagcaactcaaagaagattacttcaaaaagattgagtgcttcgacagcgtcgaaatctctggggtagaggatcggtttaacgcaagtttaggtacctaccatgacctgcttaaaatcattaaggataaagacttcttagataatgaagagaacgaagatattctcgaggacatcgtcttgacgttaaccttatttgaggatcgtgaaatgattgaggaacgcctcaaaacttatgcccacctgttcgacgataaggtgatgaagcagctgaaacgtcggcgctacacaggatggggccgcttgagtcgcaaacttattaacggaatccgtgacaagcaatccggcaaaacgattctggatttcttgaagtcggacggatttgctaatcgcaacttcatgcagttgatccatgatgactccctgacttttaaagaggatattcaaaaggcgcaggttagtggtcaaggcgacagcttacacgaacacatcgcaaatttggctggttcgccggccattaaaaaggggatcctccagaccgtgaaagttgtagatgagcttgttaaggtcatgggtcgtcataagcccgaaaacatcgtgattgaaatggcgcgggagaatcaaacgacccagaaaggacaaaagaatagccgtgaacggatgaagcggatcgaggaaggcattaaagagctggggtctcaaatcttgaaggaacaccctgtggagaacactcagctccaaaatgaaaaactttacctgtactatttgcagaacggacgcgatatgtacgtggaccaagagttggatattaatcggctgagtgactacgacgttgatcatatcgtcccgcagagcttcctcaaagacgattctattgacaataaggtactgacgcgctctgataaaaaccgtggtaagtcggacaacgtgccctccgaagaggttgtgaaaaagatgaaaaattattggcgccagcttttaaacgcgaagctgatcacacaacgtaaattcgataatttgaccaaggctgaacggggtggcctgagcgagttagataaggcaggatttattaaacgccagttagtggagactcgtcaaatcaccaaacatgtcgcgcagattttggacagccggatgaacaccaagtacgatgaaaatgacaaactgatccgtgaggtgaaagtcattactctgaagtccaaattagttagtgatttccggaaggactttcaattctacaaagtccgtgaaattaataactatcatcacgcacatgacgcgtacctgaatgcagtggttgggaccgcccttatcaagaaatatcctaagctggagtcggagtttgtctatggcgactataaggtatacgatgttcgcaaaatgattgcgaaatctgagcaggagatcggtaaggcaaccgcaaaatatttcttttactcaaacattatgaatttctttaagacagaaatcactctggccaacggggagattcgcaaacgtccgttgatcgaaacaaacggcgagactggcgaaattgtttgggacaaagggcgtgatttcgcgacggtgcgcaaggtactgagcatgcctcaagtcaatattgttaagaaaaccgaagtgcagacgggcgggttttccaaggaaagcatcttacccaaacgtaattcagataaacttattgcacgcaaaaaggactgggatccgaaaaagtatggaggcttcgacagtccaaccgtagcctactctgttctcgttgtagcgaaagtagaaaagggtaaatccaagaaactgaaatctgtcaaggagttgcttggaatcaccattatggagcgtagctccttcgagaagaacccgattgactttctggaagccaaaggatataaagaggtcaagaaagatcttatcattaagctgcctaagtattcactcttcgagctggaaaatggtcgtaaacgcatgctcgcttctgccggcgagttgcagaagggcaatgaattagcacttccatcaaagtacgttaacttcctgtatttggccagccattacgagaaactgaaggggtctccagaggacaacgaacagaaacaattatttgtagagcagcacaagcattatcttgatgaaatcattgagcaaatttccgaattcagtaaacgcgtaatcctggccgatgcaaacctcgacaaggtgctgagcgcttacaataagcatcgcgacaaacctatccgtgagcaggctgaaaatatcattcacctgttcacattaacgaacctgggcgctccggccgcttttaaatatttcgacacgacaatcgaccgtaagcgctataccagtacgaaagaagtgttggatgcgacccttattcaccagtcaattacaggattatatgagacccgtatcgaccttagccaattaggtggggatgcggccaaaagacccgccgaactggacggcgccgataatgcttctcaggccgccaagagaagatga

SEQ ID NO: 243 - DNA, 4164 bp, synthetic construct
  source 1..4164: mol_type = other DNA
atggacaaaaagtactctattggcctggatatcgggaccaacagcgtcgggtgggctgttatcaccgacgagtataaagtaccttcgaaaaagttcaaagtgctgggcaacaccgatcgccattcaatcaaaaagaacttgattggtgcgctgttgtttgactccggggaaaccgccgaggcgactcgccttaaacgtacagcacgtcgccggtacactcggcgtaagaatcgcatttgctatttgcaggaaatctttagcaacgagatggcaaaagtcgatgactcgtttttccaccgcctcgaggaaagctttctggtggaggaagacaaaaagcatgagcgtcacccgatcttcggcaacattgtcgatgaagtagcgtatcatgaaaaatacccaaccatttaccacttacgcaaaaagctggtggacagcactgacaaagctgatttgcgccttatctatttagccctggcacatatgattaagtttcgtggtcacttcctgatcgaaggagacttaaatcccgacaacagtgatgttgataaattgtttattcagcttgtccaaacttacaatcaactgttcgaggaaaacccgatcaatgcctccggtgtggatgcaaaagccattttaagtgcacgccttagcaagtcccgtcgcttagaaaaccttatcgcgcagctgcccggcgagaaaaagaatggtttgtttgggaaccttattgccttgagcttaggcctcaccccgaatttcaaaagtaatttcgatcttgcagaagacgccaaattacaactgtcgaaggatacttatgatgacgatctcgataatctgttagcgcagattggtgaccaatacgccgatctttttctggcggctaaaaatctgagcgacgccatcttgctttcggatattctccgcgttaacaccgaaatcacgaaagcgcctcttagtgccagcatgattaaacgttatgatgaacaccaccaggacctgaccttactcaaagcgttggttcgccagcaactgccagagaagtacaaagaaatcttctttgatcagtcaaagaatggttatgccggctatattgacgggggtgcaagccaagaggaattctacaaatttatcaagcctattctggagaaaatggatggcaccgaagagttattggtgaagcttaaccgtgaagacctcctgcggaaacagcgcacattcgataatggttcgatcccacaccaaatccatttgggggagttacacgctattttgcgtcgccaggaagacttttaccctttcctgaaggataaccgggagaaaattgagaagatccttacctttcgtattccgtattacgtaggccccttagcacggggtaatagccgtttcgcgtggatgacacggaagtcggaagagacgatcaccccgtggaacttcgaagaggtagtcgacaagggcgcatcagcgcagtcttttattgaacgtatgacgaatttcgataaaaacttgcccaatgagaaggtgcttccgaaacattccttgttatatgaatattttacagtttacaacgagctgaccaaggttaaatacgtgacggaaggaatgcgcaagcccgcttttcttagcggtgagcaaaaaaaggcgatcgtcgacctgttattcaaaacgaatcgtaaggtgactgtaaagcaactcaaagaagattacttcaaaaagattgagtgcttcgacagcgtcgaaatctctggggtagaggatcggtttaacgcaagtttaggtacctaccatgacctgcttaaaatcattaaggataaagacttcttagataatgaagagaacgaagatattctcgaggacatcgtcttgacgttaaccttatttgaggatcgtgaaatgattgaggaacgcctcaaaacttatgcccacctgttcgacgataaggtgatgaagcagctgaaacgtcggcgctacacaggatggggccgcttgagtcgcaaacttattaacggaatccgtgacaagcaatccggcaaaacgattctggatttcttgaagtcggacggatttgctaatcgcaacttcatgcagttgatccatgatgactccctgacttttaaagaggatattcaaaaggcgcaggttagtggtcaaggcgacagcttacacgaacacatcgcaaatttggctggttcgccggccattaaaaaggggatcctccagaccgtgaaagttgtagatgagcttgttaaggtcatgggtcgtcataagcccgaaaacatcgtgattgaaatggcgcgggagaatcaaacgacccagaaaggacaaaagaatagccgtgaacggatgaagcggatcgaggaaggcattaaagagctggggtctcaaatcttgaaggaacaccctgtggagaacactcagctccaaaatgaaaaactttacctgtactatttgcagaacggacgcgatatgtacgtggaccaagagttggatattaatcggctgagtgactacgacgttgatcatatcgtcccgcagagcttcctcaaagacgattctattgacaataaggtactgacgcgctctgataaaaaccgtggtaagtcggacaacgtgccctccgaagaggttgtgaaaaagatgaaaaattattggcgccagcttttaaacgcgaagctgatcacacaacgtaaattcgataatttgaccaaggctgaacggggtggcctgagcgagttagataaggcaggatttattaaacgccagttagtggagactcgtcaaatcaccaaacatgtcgcgcagattttggacagccggatgaacaccaagtacgatgaaaatgacaaactgatccgtgaggtgaaagtcattactctgaagtccaaattagttagtgatttccggaaggactttcaattctacaaagtccgtgaaattaataactatcatcacgcacatgacgcgtacctgaatgcagtggttgggaccgcccttatcaagaaatatcctaagctggagtcggagtttgtctatggcgactataaggtatacgatgttcgcaaaatgattgcgaaatctgagcaggagatcggtaaggcaaccgcaaaatatttcttttactcaaacattatgaatttctttaagacagaaatcactctggccaacggggagattcgcaaacgtccgttgatcgaaacaaacggcgagactggcgaaattgtttgggacaaagggcgtgatttcgcgacggtgcgcaaggtactgagcatgcctcaagtcaatattgttaagaaaaccgaagtgcagacgggcgggttttccaaggaaagcatcttacccaaacgtaattcagataaacttattgcacgcaaaaaggactgggatccgaaaaagtatggaggcttcgacagtccaaccgtagcctactctgttctcgttgtagcgaaagtagaaaagggtaaatccaagaaactgaaatctgtcaaggagttgcttggaatcaccattatggagcgtagctccttcgagaagaacccgattgactttctggaagccaaaggatataaagaggtcaagaaagatcttatcattaagctgcctaagtattcactcttcgagctggaaaatggtcgtaaacgcatgctcgcttctgccggcgagttgcagaagggcaatgaattagcacttccatcaaagtacgttaacttcctgtatttggccagccattacgagaaactgaaggggtctccagaggacaacgaacagaaacaattatttgtagagcagcacaagcattatcttgatgaaatcattgagcaaatttccgaattcagtaaacgcgtaatcctggccgatgcaaacctcgacaaggtgctgagcgcttacaataagcatcgcgacaaacctatccgtgagcaggctgaaaatatcattcacctgttcacattaacgaacctgggcgctccggccgcttttaaatatttcgacacgacaatcgaccgtaagcgctataccagtacgaaagaagtgttggatgcgacccttattcaccagtcaattacaggattatatgagacccgtatcgaccttagccaattaggtggggatgcggcccggaagagaaatagcgccaccgtgcacctgtgtcctgtgcctagaaagagatga

SEQ ID NO: 244 - DNA, 4161 bp, synthetic construct
  source 1..4161: mol_type = other DNA
atggacaaaaagtactctattggcctggatatcgggaccaacagcgtcgggtgggctgttatcaccgacgagtataaagtaccttcgaaaaagttcaaagtgctgggcaacaccgatcgccattcaatcaaaaagaacttgattggtgcgctgttgtttgactccggggaaaccgccgaggcgactcgccttaaacgtacagcacgtcgccggtacactcggcgtaagaatcgcatttgctatttgcaggaaatctttagcaacgagatggcaaaagtcgatgactcgtttttccaccgcctcgaggaaagctttctggtggaggaagacaaaaagcatgagcgtcacccgatcttcggcaacattgtcgatgaagtagcgtatcatgaaaaatacccaaccatttaccacttacgcaaaaagctggtggacagcactgacaaagctgatttgcgccttatctatttagccctggcacatatgattaagtttcgtggtcacttcctgatcgaaggagacttaaatcccgacaacagtgatgttgataaattgtttattcagcttgtccaaacttacaatcaactgttcgaggaaaacccgatcaatgcctccggtgtggatgcaaaagccattttaagtgcacgccttagcaagtcccgtcgcttagaaaaccttatcgcgcagctgcccggcgagaaaaagaatggtttgtttgggaaccttattgccttgagcttaggcctcaccccgaatttcaaaagtaatttcgatcttgcagaagacgccaaattacaactgtcgaaggatacttatgatgacgatctcgataatctgttagcgcagattggtgaccaatacgccgatctttttctggcggctaaaaatctgagcgacgccatcttgctttcggatattctccgcgttaacaccgaaatcacgaaagcgcctcttagtgccagcatgattaaacgttatgatgaacaccaccaggacctgaccttactcaaagcgttggttcgccagcaactgccagagaagtacaaagaaatcttctttgatcagtcaaagaatggttatgccggctatattgacgggggtgcaagccaagaggaattctacaaatttatcaagcctattctggagaaaatggatggcaccgaagagttattggtgaagcttaaccgtgaagacctcctgcggaaacagcgcacattcgataatggttcgatcccacaccaaatccatttgggggagttacacgctattttgcgtcgccaggaagacttttaccctttcctgaaggataaccgggagaaaattgagaagatccttacctttcgtattccgtattacgtaggccccttagcacggggtaatagccgtttcgcgtggatgacacggaagtcggaagagacgatcaccccgtggaacttcgaagaggtagtcgacaagggcgcatcagcgcagtcttttattgaacgtatgacgaatttcgataaaaacttgcccaatgagaaggtgcttccgaaacattccttgttatatgaatattttacagtttacaacgagctgaccaaggttaaatacgtgacggaaggaatgcgcaagcccgcttttcttagcggtgagcaaaaaaaggcgatcgtcgacctgttattcaaaacgaatcgtaaggtgactgtaaagcaactcaaagaagattacttcaaaaagattgagtgcttcgacagcgtcgaaatctctggggtagaggatcggtttaacgcaagtttaggtacctaccatgacctgcttaaaatcattaaggataaagacttcttagataatgaagagaacgaagatattctcgaggacatcgtcttgacgttaaccttatttgaggatcgtgaaatgattgaggaacgcctcaaaacttatgcccacctgttcgacgataaggtgatgaagcagctgaaacgtcggcgctacacaggatggggccgcttgagtcgcaaacttattaacggaatccgtgacaagcaatccggcaaaacgattctggatttcttgaagtcggacggatttgctaatcgcaacttcatgcagttgatccatgatgactccctgacttttaaagaggatattcaaaaggcgcaggttagtggtcaaggcgacagcttacacgaacacatcgcaaatttggctggttcgccggccattaaaaaggggatcctccagaccgtgaaagttgtagatgagcttgttaaggtcatgggtcgtcataagcccgaaaacatcgtgattgaaatggcgcgggagaatcaaacgacccagaaaggacaaaagaatagccgtgaacggatgaagcggatcgaggaaggcattaaagagctggggtctcaaatcttgaaggaacaccctgtggagaacactcagctccaaaatgaaaaactttacctgtactatttgcagaacggacgcgatatgtacgtggaccaagagttggatattaatcggctgagtgactacgacgttgatcatatcgtcccgcagagcttcctcaaagacgattctattgacaataaggtactgacgcgctctgataaaaaccgtggtaagtcggacaacgtgccctccgaagaggttgtgaaaaagatgaaaaattattggcgccagcttttaaacgcgaagctgatcacacaacgtaaattcgataatttgaccaaggctgaacggggtggcctgagcgagttagataaggcaggatttattaaacgccagttagtggagactcgtcaaatcaccaaacatgtcgcgcagattttggacagccggatgaacaccaagtacgatgaaaatgacaaactgatccgtgaggtgaaagtcattactctgaagtccaaattagttagtgatttccggaaggactttcaattctacaaagtccgtgaaattaataactatcatcacgcacatgacgcgtacctgaatgcagtggttgggaccgcccttatcaagaaatatcctaagctggagtcggagtttgtctatggcgactataaggtatacgatgttcgcaaaatgattgcgaaatctgagcaggagatcggtaaggcaaccgcaaaatatttcttttactcaaacattatgaatttctttaagacagaaatcactctggccaacggggagattcgcaaacgtccgttgatcgaaacaaacggcgagactggcgaaattgtttgggacaaagggcgtgatttcgcgacggtgcgcaaggtactgagcatgcctcaagtcaatattgttaagaaaaccgaagtgcagacgggcgggttttccaaggaaagcatcttacccaaacgtaattcagataaacttattgcacgcaaaaaggactgggatccgaaaaagtatggaggcttcgacagtccaaccgtagcctactctgttctcgttgtagcgaaagtagaaaagggtaaatccaagaaactgaaatctgtcaaggagttgcttggaatcaccattatggagcgtagctccttcgagaagaacccgattgactttctggaagccaaaggatataaagaggtcaagaaagatcttatcattaagctgcctaagtattcactcttcgagctggaaaatggtcgtaaacgcatgctcgcttctgccggcgagttgcagaagggcaatgaattagcacttccatcaaagtacgttaacttcctgtatttggccagccattacgagaaactgaaggggtctccagaggacaacgaacagaaacaattatttgtagagcagcacaagcattatcttgatgaaatcattgagcaaatttccgaattcagtaaacgcgtaatcctggccgatgcaaacctcgacaaggtgctgagcgcttacaataagcatcgcgacaaacctatccgtgagcaggctgaaaatatcattcacctgttcacattaacgaacctgggcgctccggccgcttttaaatatttcgacacgacaatcgaccgtaagcgctataccagtacgaaagaagtgttggatgcgacccttattcaccagtcaattacaggattatatgagacccgtatcgaccttagccaattaggtggggatgcggccaagaggcctgccacactggccaacaattctccagccgccaagcggagatga

SEQ ID NO: 245 - DNA, 4161 bp, synthetic construct
  source 1..4161: mol_type = other DNA
atggacaaaaagtactctattggcctggatatcgggaccaacagcgtcgggtgggctgttatcaccgacgagtataaagtaccttcgaaaaagttcaaagtgctgggcaacaccgatcgccattcaatcaaaaagaacttgattggtgcgctgttgtttgactccggggaaaccgccgaggcgactcgccttaaacgtacagcacgtcgccggtacactcggcgtaagaatcgcatttgctatttgcaggaaatctttagcaacgagatggcaaaagtcgatgactcgtttttccaccgcctcgaggaaagctttctggtggaggaagacaaaaagcatgagcgtcacccgatcttcggcaacattgtcgatgaagtagcgtatcatgaaaaatacccaaccatttaccacttacgcaaaaagctggtggacagcactgacaaagctgatttgcgccttatctatttagccctggcacatatgattaagtttcgtggtcacttcctgatcgaaggagacttaaatcccgacaacagtgatgttgataaattgtttattcagcttgtccaaacttacaatcaactgttcgaggaaaacccgatcaatgcctccggtgtggatgcaaaagccattttaagtgcacgccttagcaagtcccgtcgcttagaaaaccttatcgcgcagctgcccggcgagaaaaagaatggtttgtttgggaaccttattgccttgagcttaggcctcaccccgaatttcaaaagtaatttcgatcttgcagaagacgccaaattacaactgtcgaaggatacttatgatgacgatctcgataatctgttagcgcagattggtgaccaatacgccgatctttttctggcggctaaaaatctgagcgacgccatcttgctttcggatattctccgcgttaacaccgaaatcacgaaagcgcctcttagtgccagcatgattaaacgttatgatgaacaccaccaggacctgaccttactcaaagcgttggttcgccagcaactgccagagaagtacaaagaaatcttctttgatcagtcaaagaatggttatgccggctatattgacgggggtgcaagccaagaggaattctacaaatttatcaagcctattctggagaaaatggatggcaccgaagagttattggtgaagcttaaccgtgaagacctcctgcggaaacagcgcacattcgataatggttcgatcccacaccaaatccatttgggggagttacacgctattttgcgtcgccaggaagacttttaccctttcctgaaggataaccgggagaaaattgagaagatccttacctttcgtattccgtattacgtaggccccttagcacggggtaatagccgtttcgcgtggatgacacggaagtcggaagagacgatcaccccgtggaacttcgaagaggtagtcgacaagggcgcatcagcgcagtcttttattgaacgtatgacgaatttcgataaaaacttgcccaatgagaaggtgcttccgaaacattccttgttatatgaatattttacagtttacaacgagctgaccaaggttaaatacgtgacggaaggaatgcgcaagcccgcttttcttagcggtgagcaaaaaaaggcgatcgtcgacctgttattcaaaacgaatcgtaaggtgactgtaaagcaactcaaagaagattacttcaaaaagattgagtgcttcgacagcgtcgaaatctctggggtagaggatcggtttaacgcaagtttaggtacctaccatgacctgcttaaaatcattaaggataaagacttcttagataatgaagagaacgaagatattctcgaggacatcgtcttgacgttaaccttatttgaggatcgtgaaatgattgaggaacgcctcaaaacttatgcccacctgttcgacgataaggtgatgaagcagctgaaacgtcggcgctacacaggatggggccgcttgagtcgcaaacttattaacggaatccgtgacaagcaatccggcaaaacgattctggatttcttgaagtcggacggatttgctaatcgcaacttcatgcagttgatccatgatgactccctgacttttaaagaggatattcaaaaggcgcaggttagtggtcaaggcgacagcttacacgaacacatcgcaaatttggctggttcgccggccattaaaaaggggatcctccagaccgtgaaagttgtagatgagcttgttaaggtcatgggtcgtcataagcccgaaaacatcgtgattgaaatggcgcgggagaatcaaacgacccagaaaggacaaaagaatagccgtgaacggatgaagcggatcgaggaaggcattaaagagctggggtctcaaatcttgaaggaacaccctgtggagaacactcagctccaaaatgaaaaactttacctgtactatttgcagaacggacgcgatatgtacgtggaccaagagttggatattaatcggctgagtgactacgacgttgatcatatcgtcccgcagagcttcctcaaagacgattctattgacaataaggtactgacgcgctctgataaaaaccgtggtaagtcggacaacgtgccctccgaagaggttgtgaaaaagatgaaaaattattggcgccagcttttaaacgcgaagctgatcacacaacgtaaattcgataatttgaccaaggctgaacggggtggcctgagcgagttagataaggcaggatttattaaacgccagttagtggagactcgtcaaatcaccaaacatgtcgcgcagattttggacagccggatgaacaccaagtacgatgaaaatgacaaactgatccgtgaggtgaaagtcattactctgaagtccaaattagttagtgatttccggaaggactttcaattctacaaagtccgtgaaattaataactatcatcacgcacatgacgcgtacctgaatgcagtggttgggaccgcccttatcaagaaatatcctaagctggagtcggagtttgtctatggcgactataaggtatacgatgttcgcaaaatgattgcgaaatctgagcaggagatcggtaaggcaaccgcaaaatatttcttttactcaaacattatgaatttctttaagacagaaatcactctggccaacggggagattcgcaaacgtccgttgatcgaaacaaacggcgagactggcgaaattgtttgggacaaagggcgtgatttcgcgacggtgcgcaaggtactgagcatgcctcaagtcaatattgttaagaaaaccgaagtgcagacgggcgggttttccaaggaaagcatcttacccaaacgtaattcagataaacttattgcacgcaaaaaggactgggatccgaaaaagtatggaggcttcgacagtccaaccgtagcctactctgttctcgttgtagcgaaagtagaaaagggtaaatccaagaaactgaaatctgtcaaggagttgcttggaatcaccattatggagcgtagctccttcgagaagaacccgattgactttctggaagccaaaggatataaagaggtcaagaaagatcttatcattaagctgcctaagtattcactcttcgagctggaaaatggtcgtaaacgcatgctcgcttctgccggcgagttgcagaagggcaatgaattagcacttccatcaaagtacgttaacttcctgtatttggccagccattacgagaaactgaaggggtctccagaggacaacgaacagaaacaattatttgtagagcagcacaagcattatcttgatgaaatcattgagcaaatttccgaattcagtaaacgcgtaatcctggccgatgcaaacctcgacaaggtgctgagcgcttacaataagcatcgcgacaaacctatccgtgagcaggctgaaaatatcattcacctgttcacattaacgaacctgggcgctccggccgcttttaaatatttcgacacgacaatcgaccgtaagcgctataccagtacgaaagaagtgttggatgcgacccttattcaccagtcaattacaggattatatgagacccgtatcgaccttagccaattaggtggggatgcggccaagaggcctgccacactggccaatgaatctccagccgccaagcggagatga

SEQ ID NO: 246 - DNA, 4164 bp, synthetic construct
  source 1..4164: mol_type = other DNA
atggacaaaaagtactctattggcctggatatcgggaccaacagcgtcgggtgggctgttatcaccgacgagtataaagtaccttcgaaaaagttcaaagtgctgggcaacaccgatcgccattcaatcaaaaagaacttgattggtgcgctgttgtttgactccggggaaaccgccgaggcgactcgccttaaacgtacagcacgtcgccggtacactcggcgtaagaatcgcatttgctatttgcaggaaatctttagcaacgagatggcaaaagtcgatgactcgtttttccaccgcctcgaggaaagctttctggtggaggaagacaaaaagcatgagcgtcacccgatcttcggcaacattgtcgatgaagtagcgtatcatgaaaaatacccaaccatttaccacttacgcaaaaagctggtggacagcactgacaaagctgatttgcgccttatctatttagccctggcacatatgattaagtttcgtggtcacttcctgatcgaaggagacttaaatcccgacaacagtgatgttgataaattgtttattcagcttgtccaaacttacaatcaactgttcgaggaaaacccgatcaatgcctccggtgtggatgcaaaagccattttaagtgcacgccttagcaagtcccgtcgcttagaaaaccttatcgcgcagctgcccggcgagaaaaagaatggtttgtttgggaaccttattgccttgagcttaggcctcaccccgaatttcaaaagtaatttcgatcttgcagaagacgccaaattacaactgtcgaaggatacttatgatgacgatctcgataatctgttagcgcagattggtgaccaatacgccgatctttttctggcggctaaaaatctgagcgacgccatcttgctttcggatattctccgcgttaacaccgaaatcacgaaagcgcctcttagtgccagcatgattaaacgttatgatgaacaccaccaggacctgaccttactcaaagcgttggttcgccagcaactgccagagaagtacaaagaaatcttctttgatcagtcaaagaatggttatgccggctatattgacgggggtgcaagccaagaggaattctacaaatttatcaagcctattctggagaaaatggatggcaccgaagagttattggtgaagcttaaccgtgaagacctcctgcggaaacagcgcacattcgataatggttcgatcccacaccaaatccatttgggggagttacacgctattttgcgtcgccaggaagacttttaccctttcctgaaggataaccgggagaaaattgagaagatccttacctttcgtattccgtattacgtaggccccttagcacggggtaatagccgtttcgcgtggatgacacggaagtcggaagagacgatcaccccgtggaacttcgaagaggtagtcgacaagggcgcatcagcgcagtcttttattgaacgtatgacgaatttcgataaaaacttgcccaatgagaaggtgcttccgaaacattccttgttatatgaatattttacagtttacaacgagctgaccaaggttaaatacgtgacggaaggaatgcgcaagcccgcttttcttagcggtgagcaaaaaaaggcgatcgtcgacctgttattcaaaacgaatcgtaaggtgactgtaaagcaactcaaagaagattacttcaaaaagattgagtgcttcgacagcgtcgaaatctctggggtagaggatcggtttaacgcaagtttaggtacctaccatgacctgcttaaaatcattaaggataaagacttcttagataatgaagagaacgaagatattctcgaggacatcgtcttgacgttaaccttatttgaggatcgtgaaatgattgaggaacgcctcaaaacttatgcccacctgttcgacgataaggtgatgaagcagctgaaacgtcggcgctacacaggatggggccgcttgagtcgcaaacttattaacggaatccgtgacaagcaatccggcaaaacgattctggatttcttgaagtcggacggatttgctaatcgcaacttcatgcagttgatccatgatgactccctgacttttaaagaggatattcaaaaggcgcaggttagtggtcaaggcgacagcttacacgaacacatcgcaaatttggctggttcgccggccattaaaaaggggatcctccagaccgtgaaagttgtagatgagcttgttaaggtcatgggtcgtcataagcccgaaaacatcgtgattgaaatggcgcgggagaatcaaacgacccagaaaggacaaaagaatagccgtgaacggatgaagcggatcgaggaaggcattaaagagctggggtctcaaatcttgaaggaacaccctgtggagaacactcagctccaaaatgaaaaactttacctgtactatttgcagaacggacgcgatatgtacgtggaccaagagttggatattaatcggctgagtgactacgacgttgatcatatcgtcccgcagagcttcctcaaagacgattctattgacaataaggtactgacgcgctctgataaaaaccgtggtaagtcggacaacgtgccctccgaagaggttgtgaaaaagatgaaaaattattggcgccagcttttaaacgcgaagctgatcacacaacgtaaattcgataatttgaccaaggctgaacggggtggcctgagcgagttagataaggcaggatttattaaacgccagttagtggagactcgtcaaatcaccaaacatgtcgcgcagattttggacagccggatgaacaccaagtacgatgaaaatgacaaactgatccgtgaggtgaaagtcattactctgaagtccaaattagttagtgatttccggaaggactttcaattctacaaagtccgtgaaattaataactatcatcacgcacatgacgcgtacctgaatgcagtggttgggaccgcccttatcaagaaatatcctaagctggagtcggagtttgtctatggcgactataaggtatacgatgttcgcaaaatgattgcgaaatctgagcaggagatcggtaaggcaaccgcaaaatatttcttttactcaaacattatgaatttctttaagacagaaatcactctggccaacggggagattcgcaaacgtccgttgatcgaaacaaacggcgagactggcgaaattgtttgggacaaagggcgtgatttcgcgacggtgcgcaaggtactgagcatgcctcaagtcaatattgttaagaaaaccgaagtgcagacgggcgggttttccaaggaaagcatcttacccaaacgtaattcagataaacttattgcacgcaaaaaggactgggatccgaaaaagtatggaggcttcgacagtccaaccgtagcctactctgttctcgttgtagcgaaagtagaaaagggtaaatccaagaaactgaaatctgtcaaggagttgcttggaatcaccattatggagcgtagctccttcgagaagaacccgattgactttctggaagccaaaggatataaagaggtcaagaaagatcttatcattaagctgcctaagtattcactcttcgagctggaaaatggtcgtaaacgcatgctcgcttctgccggcgagttgcagaagggcaatgaattagcacttccatcaaagtacgttaacttcctgtatttggccagccattacgagaaactgaaggggtctccagaggacaacgaacagaaacaattatttgtagagcagcacaagcattatcttgatgaaatcattgagcaaatttccgaattcagtaaacgcgtaatcctggccgatgcaaacctcgacaaggtgctgagcgcttacaataagcatcgcgacaaacctatccgtgagcaggctgaaaatatcattcacctgttcacattaacgaacctgggcgctccggccgcttttaaatatttcgacacgacaatcgaccgtaagcgctataccagtacgaaagaagtgttggatgcgacccttattcaccagtcaattacaggattatatgagacccgtatcgaccttagccaattaggtggggatgcggcccggagaagaaatagcgccaccgtgcacctgtgtcctgtgcctagaaagagatga

SEQ ID NO: 247 - DNA, 4149 bp, synthetic construct
  source 1..4149: mol_type = other DNA
atggacaaaaagtactctattggcctggatatcgggaccaacagcgtcgggtgggctgttatcaccgacgagtataaagtaccttcgaaaaagttcaaagtgctgggcaacaccgatcgccattcaatcaaaaagaacttgattggtgcgctgttgtttgactccggggaaaccgccgaggcgactcgccttaaacgtacagcacgtcgccggtacactcggcgtaagaatcgcatttgctatttgcaggaaatctttagcaacgagatggcaaaagtcgatgactcgtttttccaccgcctcgaggaaagctttctggtggaggaagacaaaaagcatgagcgtcacccgatcttcggcaacattgtcgatgaagtagcgtatcatgaaaaatacccaaccatttaccacttacgcaaaaagctggtggacagcactgacaaagctgatttgcgccttatctatttagccctggcacatatgattaagtttcgtggtcacttcctgatcgaaggagacttaaatcccgacaacagtgatgttgataaattgtttattcagcttgtccaaacttacaatcaactgttcgaggaaaacccgatcaatgcctccggtgtggatgcaaaagccattttaagtgcacgccttagcaagtcccgtcgcttagaaaaccttatcgcgcagctgcccggcgagaaaaagaatggtttgtttgggaaccttattgccttgagcttaggcctcaccccgaatttcaaaagtaatttcgatcttgcagaagacgccaaattacaactgtcgaaggatacttatgatgacgatctcgataatctgttagcgcagattggtgaccaatacgccgatctttttctggcggctaaaaatctgagcgacgccatcttgctttcggatattctccgcgttaacaccgaaatcacgaaagcgcctcttagtgccagcatgattaaacgttatgatgaacaccaccaggacctgaccttactcaaagcgttggttcgccagcaactgccagagaagtacaaagaaatcttctttgatcagtcaaagaatggttatgccggctatattgacgggggtgcaagccaagaggaattctacaaatttatcaagcctattctggagaaaatggatggcaccgaagagttattggtgaagcttaaccgtgaagacctcctgcggaaacagcgcacattcgataatggttcgatcccacaccaaatccatttgggggagttacacgctattttgcgtcgccaggaagacttttaccctttcctgaaggataaccgggagaaaattgagaagatccttacctttcgtattccgtattacgtaggccccttagcacggggtaatagccgtttcgcgtggatgacacggaagtcggaagagacgatcaccccgtggaacttcgaagaggtagtcgacaagggcgcatcagcgcagtcttttattgaacgtatgacgaatttcgataaaaacttgcccaatgagaaggtgcttccgaaacattccttgttatatgaatattttacagtttacaacgagctgaccaaggttaaatacgtgacggaaggaatgcgcaagcccgcttttcttagcggtgagcaaaaaaaggcgatcgtcgacctgttattcaaaacgaatcgtaaggtgactgtaaagcaactcaaagaagattacttcaaaaagattgagtgcttcgacagcgtcgaaatctctggggtagaggatcggtttaacgcaagtttaggtacctaccatgacctgcttaaaatcattaaggataaagacttcttagataatgaagagaacgaagatattctcgaggacatcgtcttgacgttaaccttatttgaggatcgtgaaatgattgaggaacgcctcaaaacttatgcccacctgttcgacgataaggtgatgaagcagctgaaacgtcggcgctacacaggatggggccgcttgagtcgcaaacttattaacggaatccgtgacaagcaatccggcaaaacgattctggatttcttgaagtcggacggatttgctaatcgcaacttcatgcagttgatccatgatgactccctgacttttaaagaggatattcaaaaggcgcaggttagtggtcaaggcgacagcttacacgaacacatcgcaaatttggctggttcgccggccattaaaaaggggatcctccagaccgtgaaagttgtagatgagcttgttaaggtcatgggtcgtcataagcccgaaaacatcgtgattgaaatggcgcgggagaatcaaacgacccagaaaggacaaaagaatagccgtgaacggatgaagcggatcgaggaaggcattaaagagctggggtctcaaatcttgaaggaacaccctgtggagaacactcagctccaaaatgaaaaactttacctgtactatttgcagaacggacgcgatatgtacgtggaccaagagttggatattaatcggctgagtgactacgacgttgatcatatcgtcccgcagagcttcctcaaagacgattctattgacaataaggtactgacgcgctctgataaaaaccgtggtaagtcggacaacgtgccctccgaagaggttgtgaaaaagatgaaaaattattggcgccagcttttaaacgcgaagctgatcacacaacgtaaattcgataatttgaccaaggctgaacggggtggcctgagcgagttagataaggcaggatttattaaacgccagttagtggagactcgtcaaatcaccaaacatgtcgcgcagattttggacagccggatgaacaccaagtacgatgaaaatgacaaactgatccgtgaggtgaaagtcattactctgaagtccaaattagttagtgatttccggaaggactttcaattctacaaagtccgtgaaattaataactatcatcacgcacatgacgcgtacctgaatgcagtggttgggaccgcccttatcaagaaatatcctaagctggagtcggagtttgtctatggcgactataaggtatacgatgttcgcaaaatgattgcgaaatctgagcaggagatcggtaaggcaaccgcaaaatatttcttttactcaaacattatgaatttctttaagacagaaatcactctggccaacggggagattcgcaaacgtccgttgatcgaaacaaacggcgagactggcgaaattgtttgggacaaagggcgtgatttcgcgacggtgcgcaaggtactgagcatgcctcaagtcaatattgttaagaaaaccgaagtgcagacgggcgggttttccaaggaaagcatcttacccaaacgtaattcagataaacttattgcacgcaaaaaggactgggatccgaaaaagtatggaggcttcgacagtccaaccgtagcctactctgttctcgttgtagcgaaagtagaaaagggtaaatccaagaaactgaaatctgtcaaggagttgcttggaatcaccattatggagcgtagctccttcgagaagaacccgattgactttctggaagccaaaggatataaagaggtcaagaaagatcttatcattaagctgcctaagtattcactcttcgagctggaaaatggtcgtaaacgcatgctcgcttctgccggcgagttgcagaagggcaatgaattagcacttccatcaaagtacgttaacttcctgtatttggccagccattacgagaaactgaaggggtctccagaggacaacgaacagaaacaattatttgtagagcagcacaagcattatcttgatgaaatcattgagcaaatttccgaattcagtaaacgcgtaatcctggccgatgcaaacctcgacaaggtgctgagcgcttacaataagcatcgcgacaaacctatccgtgagcaggctgaaaatatcattcacctgttcacattaacgaacctgggcgctccggccgcttttaaatatttcgacacgacaatcgaccgtaagcgctataccagtacgaaagaagtgttggatgcgacccttattcaccagtcaattacaggattatatgagacccgtatcgaccttagccaattaggtggggatgcggccgataccagactgggcaagagaaagagaaggccctggtga

SEQ ID NO: 248 - DNA, 4155 bp, synthetic construct
  source 1..4155: mol_type = other DNA
atggacaaaaagtactctattggcctggatatcgggaccaacagcgtcgggtgggctgttatcaccgacgagtataaagtaccttcgaaaaagttcaaagtgctgggcaacaccgatcgccattcaatcaaaaagaacttgattggtgcgctgttgtttgactccggggaaaccgccgaggcgactcgccttaaacgtacagcacgtcgccggtacactcggcgtaagaatcgcatttgctatttgcaggaaatctttagcaacgagatggcaaaagtcgatgactcgtttttccaccgcctcgaggaaagctttctggtggaggaagacaaaaagcatgagcgtcacccgatcttcggcaacattgtcgatgaagtagcgtatcatgaaaaatacccaaccatttaccacttacgcaaaaagctggtggacagcactgacaaagctgatttgcgccttatctatttagccctggcacatatgattaagtttcgtggtcacttcctgatcgaaggagacttaaatcccgacaacagtgatgttgataaattgtttattcagcttgtccaaacttacaatcaactgttcgaggaaaacccgatcaatgcctccggtgtggatgcaaaagccattttaagtgcacgccttagcaagtcccgtcgcttagaaaaccttatcgcgcagctgcccggcgagaaaaagaatggtttgtttgggaaccttattgccttgagcttaggcctcaccccgaatttcaaaagtaatttcgatcttgcagaagacgccaaattacaactgtcgaaggatacttatgatgacgatctcgataatctgttagcgcagattggtgaccaatacgccgatctttttctggcggctaaaaatctgagcgacgccatcttgctttcggatattctccgcgttaacaccgaaatcacgaaagcgcctcttagtgccagcatgattaaacgttatgatgaacaccaccaggacctgaccttactcaaagcgttggttcgccagcaactgccagagaagtacaaagaaatcttctttgatcagtcaaagaatggttatgccggctatattgacgggggtgcaagccaagaggaattctacaaatttatcaagcctattctggagaaaatggatggcaccgaagagttattggtgaagcttaaccgtgaagacctcctgcggaaacagcgcacattcgataatggttcgatcccacaccaaatccatttgggggagttacacgctattttgcgtcgccaggaagacttttaccctttcctgaaggataaccgggagaaaattgagaagatccttacctttcgtattccgtattacgtaggccccttagcacggggtaatagccgtttcgcgtggatgacacggaagtcggaagagacgatcaccccgtggaacttcgaagaggtagtcgacaagggcgcatcagcgcagtcttttattgaacgtatgacgaatttcgataaaaacttgcccaatgagaaggtgcttccgaaacattccttgttatatgaatattttacagtttacaacgagctgaccaaggttaaatacgtgacggaaggaatgcgcaagcccgcttttcttagcggtgagcaaaaaaaggcgatcgtcgacctgttattcaaaacgaatcgtaaggtgactgtaaagcaactcaaagaagattacttcaaaaagattgagtgcttcgacagcgtcgaaatctctggggtagaggatcggtttaacgcaagtttaggtacctaccatgacctgcttaaaatcattaaggataaagacttcttagataatgaagagaacgaagatattctcgaggacatcgtcttgacgttaaccttatttgaggatcgtgaaatgattgaggaacgcctcaaaacttatgcccacctgttcgacgataaggtgatgaagcagctgaaacgtcggcgctacacaggatggggccgcttgagtcgcaaacttattaacggaatccgtgacaagcaatccggcaaaacgattctggatttcttgaagtcggacggatttgctaatcgcaacttcatgcagttgatccatgatgactccctgacttttaaagaggatattcaaaaggcgcaggttagtggtcaaggcgacagcttacacgaacacatcgcaaatttggctggttcgccggccattaaaaaggggatcctccagaccgtgaaagttgtagatgagcttgttaaggtcatgggtcgtcataagcccgaaaacatcgtgattgaaatggcgcgggagaatcaaacgacccagaaaggacaaaagaatagccgtgaacggatgaagcggatcgaggaaggcattaaagagctggggtctcaaatcttgaaggaacaccctgtggagaacactcagctccaaaatgaaaaactttacctgtactatttgcagaacggacgcgatatgtacgtggaccaagagttggatattaatcggctgagtgactacgacgttgatcatatcgtcccgcagagcttcctcaaagacgattctattgacaataaggtactgacgcgctctgataaaaaccgtggtaagtcggacaacgtgccctccgaagaggttgtgaaaaagatgaaaaattattggcgccagcttttaaacgcgaagctgatcacacaacgtaaattcgataatttgaccaaggctgaacggggtggcctgagcgagttagataaggcaggatttattaaacgccagttagtggagactcgtcaaatcaccaaacatgtcgcgcagattttggacagccggatgaacaccaagtacgatgaaaatgacaaactgatccgtgaggtgaaagtcattactctgaagtccaaattagttagtgatttccggaaggactttcaattctacaaagtccgtgaaattaataactatcatcacgcacatgacgcgtacctgaatgcagtggttgggaccgcccttatcaagaaatatcctaagctggagtcggagtttgtctatggcgactataaggtatacgatgttcgcaaaatgattgcgaaatctgagcaggagatcggtaaggcaaccgcaaaatatttcttttactcaaacattatgaatttctttaagacagaaatcactctggccaacggggagattcgcaaacgtccgttgatcgaaacaaacggcgagactggcgaaattgtttgggacaaagggcgtgatttcgcgacggtgcgcaaggtactgagcatgcctcaagtcaatattgttaagaaaaccgaagtgcagacgggcgggttttccaaggaaagcatcttacccaaacgtaattcagataaacttattgcacgcaaaaaggactgggatccgaaaaagtatggaggcttcgacagtccaaccgtagcctactctgttctcgttgtagcgaaagtagaaaagggtaaatccaagaaactgaaatctgtcaaggagttgcttggaatcaccattatggagcgtagctccttcgagaagaacccgattgactttctggaagccaaaggatataaagaggtcaagaaagatcttatcattaagctgcctaagtattcactcttcgagctggaaaatggtcgtaaacgcatgctcgcttctgccggcgagttgcagaagggcaatgaattagcacttccatcaaagtacgttaacttcctgtatttggccagccattacgagaaactgaaggggtctccagaggacaacgaacagaaacaattatttgtagagcagcacaagcattatcttgatgaaatcattgagcaaatttccgaattcagtaaacgcgtaatcctggccgatgcaaacctcgacaaggtgctgagcgcttacaataagcatcgcgacaaacctatccgtgagcaggctgaaaatatcattcacctgttcacattaacgaacctgggcgctccggccgcttttaaatatttcgacacgacaatcgaccgtaagcgctataccagtacgaaagaagtgttggatgcgacccttattcaccagtcaattacaggattatatgagacccgtatcgaccttagccaattaggtggggatgcggcccggagaagaagcgtgctgaagagatcttggagcgtggccttctga

SEQ ID NO: 249 - DNA, 4161 bp, synthetic construct
  source 1..4161: mol_type = other DNA
atggacaaaaagtactctattggcctggatatcgggaccaacagcgtcgggtgggctgttatcaccgacgagtataaagtaccttcgaaaaagttcaaagtgctgggcaacaccgatcgccattcaatcaaaaagaacttgattggtgcgctgttgtttgactccggggaaaccgccgaggcgactcgccttaaacgtacagcacgtcgccggtacactcggcgtaagaatcgcatttgctatttgcaggaaatctttagcaacgagatggcaaaagtcgatgactcgtttttccaccgcctcgaggaaagctttctggtggaggaagacaaaaagcatgagcgtcacccgatcttcggcaacattgtcgatgaagtagcgtatcatgaaaaatacccaaccatttaccacttacgcaaaaagctggtggacagcactgacaaagctgatttgcgccttatctatttagccctggcacatatgattaagtttcgtggtcacttcctgatcgaaggagacttaaatcccgacaacagtgatgttgataaattgtttattcagcttgtccaaacttacaatcaactgttcgaggaaaacccgatcaatgcctccggtgtggatgcaaaagccattttaagtgcacgccttagcaagtcccgtcgcttagaaaaccttatcgcgcagctgcccggcgagaaaaagaatggtttgtttgggaaccttattgccttgagcttaggcctcaccccgaatttcaaaagtaatttcgatcttgcagaagacgccaaattacaactgtcgaaggatacttatgatgacgatctcgataatctgttagcgcagattggtgaccaatacgccgatctttttctggcggctaaaaatctgagcgacgccatcttgctttcggatattctccgcgttaacaccgaaatcacgaaagcgcctcttagtgccagcatgattaaacgttatgatgaacaccaccaggacctgaccttactcaaagcgttggttcgccagcaactgccagagaagtacaaagaaatcttctttgatcagtcaaagaatggttatgccggctatattgacgggggtgcaagccaagaggaattctacaaatttatcaagcctattctggagaaaatggatggcaccgaagagttattggtgaagcttaaccgtgaagacctcctgcggaaacagcgcacattcgataatggttcgatcccacaccaaatccatttgggggagttacacgctattttgcgtcgccaggaagacttttaccctttcctgaaggataaccgggagaaaattgagaagatccttacctttcgtattccgtattacgtaggccccttagcacggggtaatagccgtttcgcgtggatgacacggaagtcggaagagacgatcaccccgtggaacttcgaagaggtagtcgacaagggcgcatcagcgcagtcttttattgaacgtatgacgaatttcgataaaaacttgcccaatgagaaggtgcttccgaaacattccttgttatatgaatattttacagtttacaacgagctgaccaaggttaaatacgtgacggaaggaatgcgcaagcccgcttttcttagcggtgagcaaaaaaaggcgatcgtcgacctgttattcaaaacgaatcgtaaggtgactgtaaagcaactcaaagaagattacttcaaaaagattgagtgcttcgacagcgtcgaaatctctggggtagaggatcggtttaacgcaagtttaggtacctaccatgacctgcttaaaatcattaaggataaagacttcttagataatgaagagaacgaagatattctcgaggacatcgtcttgacgttaaccttatttgaggatcgtgaaatgattgaggaacgcctcaaaacttatgcccacctgttcgacgataaggtgatgaagcagctgaaacgtcggcgctacacaggatggggccgcttgagtcgcaaacttattaacggaatccgtgacaagcaatccggcaaaacgattctggatttcttgaagtcggacggatttgctaatcgcaacttcatgcagttgatccatgatgactccctgacttttaaagaggatattcaaaaggcgcaggttagtggtcaaggcgacagcttacacgaacacatcgcaaatttggctggttcgccggccattaaaaaggggatcctccagaccgtgaaagttgtagatgagcttgttaaggtcatgggtcgtcataagcccgaaaacatcgtgattgaaatggcgcgggagaatcaaacgacccagaaaggacaaaagaatagccgtgaacggatgaagcggatcgaggaaggcattaaagagctggggtctcaaatcttgaaggaacaccctgtggagaacactcagctccaaaatgaaaaactttacctgtactatttgcagaacggacgcgatatgtacgtggaccaagagttggatattaatcggctgagtgactacgacgttgatcatatcgtcccgcagagcttcctcaaagacgattctattgacaataaggtactgacgcgctctgataaaaaccgtggtaagtcggacaacgtgccctccgaagaggttgtgaaaaagatgaaaaattattggcgccagcttttaaacgcgaagctgatcacacaacgtaaattcgataatttgaccaaggctgaacggggtggcctgagcgagttagataaggcaggatttattaaacgccagttagtggagactcgtcaaatcaccaaacatgtcgcgcagattttggacagccggatgaacaccaagtacgatgaaaatgacaaactgatccgtgaggtgaaagtcattactctgaagtccaaattagttagtgatttccggaaggactttcaattctacaaagtccgtgaaattaataactatcatcacgcacatgacgcgtacctgaatgcagtggttgggaccgcccttatcaagaaatatcctaagctggagtcggagtttgtctatggcgactataaggtatacgatgttcgcaaaatgattgcgaaatctgagcaggagatcggtaaggcaaccgcaaaatatttcttttactcaaacattatgaatttctttaagacagaaatcactctggccaacggggagattcgcaaacgtccgttgatcgaaacaaacggcgagactggcgaaattgtttgggacaaagggcgtgatttcgcgacggtgcgcaaggtactgagcatgcctcaagtcaatattgttaagaaaaccgaagtgcagacgggcgggttttccaaggaaagcatcttacccaaacgtaattcagataaacttattgcacgcaaaaaggactgggatccgaaaaagtatggaggcttcgacagtccaaccgtagcctactctgttctcgttgtagcgaaagtagaaaagggtaaatccaagaaactgaaatctgtcaaggagttgcttggaatcaccattatggagcgtagctccttcgagaagaacccgattgactttctggaagccaaaggatataaagaggtcaagaaagatcttatcattaagctgcctaagtattcactcttcgagctggaaaatggtcgtaaacgcatgctcgcttctgccggcgagttgcagaagggcaatgaattagcacttccatcaaagtacgttaacttcctgtatttggccagccattacgagaaactgaaggggtctccagaggacaacgaacagaaacaattatttgtagagcagcacaagcattatcttgatgaaatcattgagcaaatttccgaattcagtaaacgcgtaatcctggccgatgcaaacctcgacaaggtgctgagcgcttacaataagcatcgcgacaaacctatccgtgagcaggctgaaaatatcattcacctgttcacattaacgaacctgggcgctccggccgcttttaaatatttcgacacgacaatcgaccgtaagcgctataccagtacgaaagaagtgttggatgcgacccttattcaccagtcaattacaggattatatgagacccgtatcgaccttagccaattaggtggggatgcggccaagaggcctgccacactggccaatgattctccagccgccaagcggagatga

SEQ ID NO: 250 - DNA, 4170 bp, synthetic construct
  source 1..4170: mol_type = other DNA
atggacaaaaagtactctattggcctggatatcgggaccaacagcgtcgggtgggctgttatcaccgacgagtataaagtaccttcgaaaaagttcaaagtgctgggcaacaccgatcgccattcaatcaaaaagaacttgattggtgcgctgttgtttgactccggggaaaccgccgaggcgactcgccttaaacgtacagcacgtcgccggtacactcggcgtaagaatcgcatttgctatttgcaggaaatctttagcaacgagatggcaaaagtcgatgactcgtttttccaccgcctcgaggaaagctttctggtggaggaagacaaaaagcatgagcgtcacccgatcttcggcaacattgtcgatgaagtagcgtatcatgaaaaatacccaaccatttaccacttacgcaaaaagctggtggacagcactgacaaagctgatttgcgccttatctatttagccctggcacatatgattaagtttcgtggtcacttcctgatcgaaggagacttaaatcccgacaacagtgatgttgataaattgtttattcagcttgtccaaacttacaatcaactgttcgaggaaaacccgatcaatgcctccggtgtggatgcaaaagccattttaagtgcacgccttagcaagtcccgtcgcttagaaaaccttatcgcgcagctgcccggcgagaaaaagaatggtttgtttgggaaccttattgccttgagcttaggcctcaccccgaatttcaaaagtaatttcgatcttgcagaagacgccaaattacaactgtcgaaggatacttatgatgacgatctcgataatctgttagcgcagattggtgaccaatacgccgatctttttctggcggctaaaaatctgagcgacgccatcttgctttcggatattctccgcgttaacaccgaaatcacgaaagcgcctcttagtgccagcatgattaaacgttatgatgaacaccaccaggacctgaccttactcaaagcgttggttcgccagcaactgccagagaagtacaaagaaatcttctttgatcagtcaaagaatggttatgccggctatattgacgggggtgcaagccaagaggaattctacaaatttatcaagcctattctggagaaaatggatggcaccgaagagttattggtgaagcttaaccgtgaagacctcctgcggaaacagcgcacattcgataatggttcgatcccacaccaaatccatttgggggagttacacgctattttgcgtcgccaggaagacttttaccctttcctgaaggataaccgggagaaaattgagaagatccttacctttcgtattccgtattacgtaggccccttagcacggggtaatagccgtttcgcgtggatgacacggaagtcggaagagacgatcaccccgtggaacttcgaagaggtagtcgacaagggcgcatcagcgcagtcttttattgaacgtatgacgaatttcgataaaaacttgcccaatgagaaggtgcttccgaaacattccttgttatatgaatattttacagtttacaacgagctgaccaaggttaaatacgtgacggaaggaatgcgcaagcccgcttttcttagcggtgagcaaaaaaaggcgatcgtcgacctgttattcaaaacgaatcgtaaggtgactgtaaagcaactcaaagaagattacttcaaaaagattgagtgcttcgacagcgtcgaaatctctggggtagaggatcggtttaacgcaagtttaggtacctaccatgacctgcttaaaatcattaaggataaagacttcttagataatgaagagaacgaagatattctcgaggacatcgtcttgacgttaaccttatttgaggatcgtgaaatgattgaggaacgcctcaaaacttatgcccacctgttcgacgataaggtgatgaagcagctgaaacgtcggcgctacacaggatggggccgcttgagtcgcaaacttattaacggaatccgtgacaagcaatccggcaaaacgattctggatttcttgaagtcggacggatttgctaatcgcaacttcatgcagttgatccatgatgactccctgacttttaaagaggatattcaaaaggcgcaggttagtggtcaaggcgacagcttacacgaacacatcgcaaatttggctggttcgccggccattaaaaaggggatcctccagaccgtgaaagttgtagatgagcttgttaaggtcatgggtcgtcataagcccgaaaacatcgtgattgaaatggcgcgggagaatcaaacgacccagaaaggacaaaagaatagccgtgaacggatgaagcggatcgaggaaggcattaaagagctggggtctcaaatcttgaaggaacaccctgtggagaacactcagctccaaaatgaaaaactttacctgtactatttgcagaacggacgcgatatgtacgtggaccaagagttggatattaatcggctgagtgactacgacgttgatcatatcgtcccgcagagcttcctcaaagacgattctattgacaataaggtactgacgcgctctgataaaaaccgtggtaagtcggacaacgtgccctccgaagaggttgtgaaaaagatgaaaaattattggcgccagcttttaaacgcgaagctgatcacacaacgtaaattcgataatttgaccaaggctgaacggggtggcctgagcgagttagataaggcaggatttattaaacgccagttagtggagactcgtcaaatcaccaaacatgtcgcgcagattttggacagccggatgaacaccaagtacgatgaaaatgacaaactgatccgtgaggtgaaagtcattactctgaagtccaaattagttagtgatttccggaaggactttcaattctacaaagtccgtgaaattaataactatcatcacgcacatgacgcgtacctgaatgcagtggttgggaccgcccttatcaagaaatatcctaagctggagtcggagtttgtctatggcgactataaggtatacgatgttcgcaaaatgattgcgaaatctgagcaggagatcggtaaggcaaccgcaaaatatttcttttactcaaacattatgaatttctttaagacagaaatcactctggccaacggggagattcgcaaacgtccgttgatcgaaacaaacggcgagactggcgaaattgtttgggacaaagggcgtgatttcgcgacggtgcgcaaggtactgagcatgcctcaagtcaatattgttaagaaaaccgaagtgcagacgggcgggttttccaaggaaagcatcttacccaaacgtaattcagataaacttattgcacgcaaaaaggactgggatccgaaaaagtatggaggcttcgacagtccaaccgtagcctactctgttctcgttgtagcgaaagtagaaaagggtaaatccaagaaactgaaatctgtcaaggagttgcttggaatcaccattatggagcgtagctccttcgagaagaacccgattgactttctggaagccaaaggatataaagaggtcaagaaagatcttatcattaagctgcctaagtattcactcttcgagctggaaaatggtcgtaaacgcatgctcgcttctgccggcgagttgcagaagggcaatgaattagcacttccatcaaagtacgttaacttcctgtatttggccagccattacgagaaactgaaggggtctccagaggacaacgaacagaaacaattatttgtagagcagcacaagcattatcttgatgaaatcattgagcaaatttccgaattcagtaaacgcgtaatcctggccgatgcaaacctcgacaaggtgctgagcgcttacaataagcatcgcgacaaacctatccgtgagcaggctgaaaatatcattcacctgttcacattaacgaacctgggcgctccggccgcttttaaatatttcgacacgacaatcgaccgtaagcgctataccagtacgaaagaagtgttggatgcgacccttattcaccagtcaattacaggattatatgagacccgtatcgaccttagccaattaggtggggatgcggccaaaagacctgctgctctggctggcgccggaaatgcttctcaggccgccaaaagaagatga

SEQ ID NO: 251 - DNA, 4170 bp, synthetic construct
  source 1..4170: mol_type = other DNA
atggacaaaaagtactctattggcctggatatcgggaccaacagcgtcgggtgggctgttatcaccgacgagtataaagtaccttcgaaaaagttcaaagtgctgggcaacaccgatcgccattcaatcaaaaagaacttgattggtgcgctgttgtttgactccggggaaaccgccgaggcgactcgccttaaacgtacagcacgtcgccggtacactcggcgtaagaatcgcatttgctatttgcaggaaatctttagcaacgagatggcaaaagtcgatgactcgtttttccaccgcctcgaggaaagctttctggtggaggaagacaaaaagcatgagcgtcacccgatcttcggcaacattgtcgatgaagtagcgtatcatgaaaaatacccaaccatttaccacttacgcaaaaagctggtggacagcactgacaaagctgatttgcgccttatctatttagccctggcacatatgattaagtttcgtggtcacttcctgatcgaaggagacttaaatcccgacaacagtgatgttgataaattgtttattcagcttgtccaaacttacaatcaactgttcgaggaaaacccgatcaatgcctccggtgtggatgcaaaagccattttaagtgcacgccttagcaagtcccgtcgcttagaaaaccttatcgcgcagctgcccggcgagaaaaagaatggtttgtttgggaaccttattgccttgagcttaggcctcaccccgaatttcaaaagtaatttcgatcttgcagaagacgccaaattacaactgtcgaaggatacttatgatgacgatctcgataatctgttagcgcagattggtgaccaatacgccgatctttttctggcggctaaaaatctgagcgacgccatcttgctttcggatattctccgcgttaacaccgaaatcacgaaagcgcctcttagtgccagcatgattaaacgttatgatgaacaccaccaggacctgaccttactcaaagcgttggttcgccagcaactgccagagaagtacaaagaaatcttctttgatcagtcaaagaatggttatgccggctatattgacgggggtgcaagccaagaggaattctacaaatttatcaagcctattctggagaaaatggatggcaccgaagagttattggtgaagcttaaccgtgaagacctcctgcggaaacagcgcacattcgataatggttcgatcccacaccaaatccatttgggggagttacacgctattttgcgtcgccaggaagacttttaccctttcctgaaggataaccgggagaaaattgagaagatccttacctttcgtattccgtattacgtaggccccttagcacggggtaatagccgtttcgcgtggatgacacggaagtcggaagagacgatcaccccgtggaacttcgaagaggtagtcgacaagggcgcatcagcgcagtcttttattgaacgtatgacgaatttcgataaaaacttgcccaatgagaaggtgcttccgaaacattccttgttatatgaatattttacagtttacaacgagctgaccaaggttaaatacgtgacggaaggaatgcgcaagcccgcttttcttagcggtgagcaaaaaaaggcgatcgtcgacctgttattcaaaacgaatcgtaaggtgactgtaaagcaactcaaagaagattacttcaaaaagattgagtgcttcgacagcgtcgaaatctctggggtagaggatcggtttaacgcaagtttaggtacctaccatgacctgcttaaaatcattaaggataaagacttcttagataatgaagagaacgaagatattctcgaggacatcgtcttgacgttaaccttatttgaggatcgtgaaatgattgaggaacgcctcaaaacttatgcccacctgttcgacgataaggtgatgaagcagctgaaacgtcggcgctacacaggatggggccgcttgagtcgcaaacttattaacggaatccgtgacaagcaatccggcaaaacgattctggatttcttgaagtcggacggatttgctaatcgcaacttcatgcagttgatccatgatgactccctgacttttaaagaggatattcaaaaggcgcaggttagtggtcaaggcgacagcttacacgaacacatcgcaaatttggctggttcgccggccattaaaaaggggatcctccagaccgtgaaagttgtagatgagcttgttaaggtcatgggtcgtcataagcccgaaaacatcgtgattgaaatggcgcgggagaatcaaacgacccagaaaggacaaaagaatagccgtgaacggatgaagcggatcgaggaaggcattaaagagctggggtctcaaatcttgaaggaacaccctgtggagaacactcagctccaaaatgaaaaactttacctgtactatttgcagaacggacgcgatatgtacgtggaccaagagttggatattaatcggctgagtgactacgacgttgatcatatcgtcccgcagagcttcctcaaagacgattctattgacaataaggtactgacgcgctctgataaaaaccgtggtaagtcggacaacgtgccctccgaagaggttgtgaaaaagatgaaaaattattggcgccagcttttaaacgcgaagctgatcacacaacgtaaattcgataatttgaccaaggctgaacggggtggcctgagcgagttagataaggcaggatttattaaacgccagttagtggagactcgtcaaatcaccaaacatgtcgcgcagattttggacagccggatgaacaccaagtacgatgaaaatgacaaactgatccgtgaggtgaaagtcattactctgaagtccaaattagttagtgatttccggaaggactttcaattctacaaagtccgtgaaattaataactatcatcacgcacatgacgcgtacctgaatgcagtggttgggaccgcccttatcaagaaatatcctaagctggagtcggagtttgtctatggcgactataaggtatacgatgttcgcaaaatgattgcgaaatctgagcaggagatcggtaaggcaaccgcaaaatatttcttttactcaaacattatgaatttctttaagacagaaatcactctggccaacggggagattcgcaaacgtccgttgatcgaaacaaacggcgagactggcgaaattgtttgggacaaagggcgtgatttcgcgacggtgcgcaaggtactgagcatgcctcaagtcaatattgttaagaaaaccgaagtgcagacgggcgggttttccaaggaaagcatcttacccaaacgtaattcagataaacttattgcacgcaaaaaggactgggatccgaaaaagtatggaggcttcgacagtccaaccgtagcctactctgttctcgttgtagcgaaagtagaaaagggtaaatccaagaaactgaaatctgtcaaggagttgcttggaatcaccattatggagcgtagctccttcgagaagaacccgattgactttctggaagccaaaggatataaagaggtcaagaaagatcttatcattaagctgcctaagtattcactcttcgagctggaaaatggtcgtaaacgcatgctcgcttctgccggcgagttgcagaagggcaatgaattagcacttccatcaaagtacgttaacttcctgtatttggccagccattacgagaaactgaaggggtctccagaggacaacgaacagaaacaattatttgtagagcagcacaagcattatcttgatgaaatcattgagcaaatttccgaattcagtaaacgcgtaatcctggccgatgcaaacctcgacaaggtgctgagcgcttacaataagcatcgcgacaaacctatccgtgagcaggctgaaaatatcattcacctgttcacattaacgaacctgggcgctccggccgcttttaaatatttcgacacgacaatcgaccgtaagcgctataccagtacgaaagaagtgttggatgcgacccttattcaccagtcaattacaggattatatgagacccgtatcgaccttagccaattaggtggggatgcggccaaaagacccgccgagctggacgaagccgataatgcttctcaggccgccaagcggagatga

SEQ ID NO: 252 - DNA, 4149 bp, synthetic construct
  source 1..4149: mol_type = other DNA
atggacaaaaagtactctattggcctggatatcgggaccaacagcgtcgggtgggctgttatcaccgacgagtataaagtaccttcgaaaaagttcaaagtgctgggcaacaccgatcgccattcaatcaaaaagaacttgattggtgcgctgttgtttgactccggggaaaccgccgaggcgactcgccttaaacgtacagcacgtcgccggtacactcggcgtaagaatcgcatttgctatttgcaggaaatctttagcaacgagatggcaaaagtcgatgactcgtttttccaccgcctcgaggaaagctttctggtggaggaagacaaaaagcatgagcgtcacccgatcttcggcaacattgtcgatgaagtagcgtatcatgaaaaatacccaaccatttaccacttacgcaaaaagctggtggacagcactgacaaagctgatttgcgccttatctatttagccctggcacatatgattaagtttcgtggtcacttcctgatcgaaggagacttaaatcccgacaacagtgatgttgataaattgtttattcagcttgtccaaacttacaatcaactgttcgaggaaaacccgatcaatgcctccggtgtggatgcaaaagccattttaagtgcacgccttagcaagtcccgtcgcttagaaaaccttatcgcgcagctgcccggcgagaaaaagaatggtttgtttgggaaccttattgccttgagcttaggcctcaccccgaatttcaaaagtaatttcgatcttgcagaagacgccaaattacaactgtcgaaggatacttatgatgacgatctcgataatctgttagcgcagattggtgaccaatacgccgatctttttctggcggctaaaaatctgagcgacgccatcttgctttcggatattctccgcgttaacaccgaaatcacgaaagcgcctcttagtgccagcatgattaaacgttatgatgaacaccaccaggacctgaccttactcaaagcgttggttcgccagcaactgccagagaagtacaaagaaatcttctttgatcagtcaaagaatggttatgccggctatattgacgggggtgcaagccaagaggaattctacaaatttatcaagcctattctggagaaaatggatggcaccgaagagttattggtgaagcttaaccgtgaagacctcctgcggaaacagcgcacattcgataatggttcgatcccacaccaaatccatttgggggagttacacgctattttgcgtcgccaggaagacttttaccctttcctgaaggataaccgggagaaaattgagaagatccttacctttcgtattccgtattacgtaggccccttagcacggggtaatagccgtttcgcgtggatgacacggaagtcggaagagacgatcaccccgtggaacttcgaagaggtagtcgacaagggcgcatcagcgcagtcttttattgaacgtatgacgaatttcgataaaaacttgcccaatgagaaggtgcttccgaaacattccttgttatatgaatattttacagtttacaacgagctgaccaaggttaaatacgtgacggaaggaatgcgcaagcccgcttttcttagcggtgagcaaaaaaaggcgatcgtcgacctgttattcaaaacgaatcgtaaggtgactgtaaagcaactcaaagaagattacttcaaaaagattgagtgcttcgacagcgtcgaaatctctggggtagaggatcggtttaacgcaagtttaggtacctaccatgacctgcttaaaatcattaaggataaagacttcttagataatgaagagaacgaagatattctcgaggacatcgtcttgacgttaaccttatttgaggatcgtgaaatgattgaggaacgcctcaaaacttatgcccacctgttcgacgataaggtgatgaagcagctgaaacgtcggcgctacacaggatggggccgcttgagtcgcaaacttattaacggaatccgtgacaagcaatccggcaaaacgattctggatttcttgaagtcggacggatttgctaatcgcaacttcatgcagttgatccatgatgactccctgacttttaaagaggatattcaaaaggcgcaggttagtggtcaaggcgacagcttacacgaacacatcgcaaatttggctggttcgccggccattaaaaaggggatcctccagaccgtgaaagttgtagatgagcttgttaaggtcatgggtcgtcataagcccgaaaacatcgtgattgaaatggcgcgggagaatcaaacgacccagaaaggacaaaagaatagccgtgaacggatgaagcggatcgaggaaggcattaaagagctggggtctcaaatcttgaaggaacaccctgtggagaacactcagctccaaaatgaaaaactttacctgtactatttgcagaacggacgcgatatgtacgtggaccaagagttggatattaatcggctgagtgactacgacgttgatcatatcgtcccgcagagcttcctcaaagacgattctattgacaataaggtactgacgcgctctgataaaaaccgtggtaagtcggacaacgtgccctccgaagaggttgtgaaaaagatgaaaaattattggcgccagcttttaaacgcgaagctgatcacacaacgtaaattcgataatttgaccaaggctgaacggggtggcctgagcgagttagataaggcaggatttattaaacgccagttagtggagactcgtcaaatcaccaaacatgtcgcgcagattttggacagccggatgaacaccaagtacgatgaaaatgacaaactgatccgtgaggtgaaagtcattactctgaagtccaaattagttagtgatttccggaaggactttcaattctacaaagtccgtgaaattaataactatcatcacgcacatgacgcgtacctgaatgcagtggttgggaccgcccttatcaagaaatatcctaagctggagtcggagtttgtctatggcgactataaggtatacgatgttcgcaaaatgattgcgaaatctgagcaggagatcggtaaggcaaccgcaaaatatttcttttactcaaacattatgaatttctttaagacagaaatcactctggccaacggggagattcgcaaacgtccgttgatcgaaacaaacggcgagactggcgaaattgtttgggacaaagggcgtgatttcgcgacggtgcgcaaggtactgagcatgcctcaagtcaatattgttaagaaaaccgaagtgcagacgggcgggttttccaaggaaagcatcttacccaaacgtaattcagataaacttattgcacgcaaaaaggactgggatccgaaaaagtatggaggcttcgacagtccaaccgtagcctactctgttctcgttgtagcgaaagtagaaaagggtaaatccaagaaactgaaatctgtcaaggagttgcttggaatcaccattatggagcgtagctccttcgagaagaacccgattgactttctggaagccaaaggatataaagaggtcaagaaagatcttatcattaagctgcctaagtattcactcttcgagctggaaaatggtcgtaaacgcatgctcgcttctgccggcgagttgcagaagggcaatgaattagcacttccatcaaagtacgttaacttcctgtatttggccagccattacgagaaactgaaggggtctccagaggacaacgaacagaaacaattatttgtagagcagcacaagcattatcttgatgaaatcattgagcaaatttccgaattcagtaaacgcgtaatcctggccgatgcaaacctcgacaaggtgctgagcgcttacaataagcatcgcgacaaacctatccgtgagcaggctgaaaatatcattcacctgttcacattaacgaacctgggcgctccggccgcttttaaatatttcgacacgacaatcgaccgtaagcgctataccagtacgaaagaagtgttggatgcgacccttattcaccagtcaattacaggattatatgagacccgtatcgaccttagccaattaggtggggatgcggcccggagaagaaagcggcgcagagagtgggaagatttctga

SEQ ID NO: 253 - DNA, 4149 bp, synthetic construct
  source 1..4149: mol_type = other DNA
atggacaaaaagtactctattggcctggatatcgggaccaacagcgtcgggtgggctgttatcaccgacgagtataaagtaccttcgaaaaagttcaaagtgctgggcaacaccgatcgccattcaatcaaaaagaacttgattggtgcgctgttgtttgactccggggaaaccgccgaggcgactcgccttaaacgtacagcacgtcgccggtacactcggcgtaagaatcgcatttgctatttgcaggaaatctttagcaacgagatggcaaaagtcgatgactcgtttttccaccgcctcgaggaaagctttctggtggaggaagacaaaaagcatgagcgtcacccgatcttcggcaacattgtcgatgaagtagcgtatcatgaaaaatacccaaccatttaccacttacgcaaaaagctggtggacagcactgacaaagctgatttgcgccttatctatttagccctggcacatatgattaagtttcgtggtcacttcctgatcgaaggagacttaaatcccgacaacagtgatgttgataaattgtttattcagcttgtccaaacttacaatcaactgttcgaggaaaacccgatcaatgcctccggtgtggatgcaaaagccattttaagtgcacgccttagcaagtcccgtcgcttagaaaaccttatcgcgcagctgcccggcgagaaaaagaatggtttgtttgggaaccttattgccttgagcttaggcctcaccccgaatttcaaaagtaatttcgatcttgcagaagacgccaaattacaactgtcgaaggatacttatgatgacgatctcgataatctgttagcgcagattggtgaccaatacgccgatctttttctggcggctaaaaatctgagcgacgccatcttgctttcggatattctccgcgttaacaccgaaatcacgaaagcgcctcttagtgccagcatgattaaacgttatgatgaacaccaccaggacctgaccttactcaaagcgttggttcgccagcaactgccagagaagtacaaagaaatcttctttgatcagtcaaagaatggttatgccggctatattgacgggggtgcaagccaagaggaattctacaaatttatcaagcctattctggagaaaatggatggcaccgaagagttattggtgaagcttaaccgtgaagacctcctgcggaaacagcgcacattcgataatggttcgatcccacaccaaatccatttgggggagttacacgctattttgcgtcgccaggaagacttttaccctttcctgaaggataaccgggagaaaattgagaagatccttacctttcgtattccgtattacgtaggccccttagcacggggtaatagccgtttcgcgtggatgacacggaagtcggaagagacgatcaccccgtggaacttcgaagaggtagtcgacaagggcgcatcagcgcagtcttttattgaacgtatgacgaatttcgataaaaacttgcccaatgagaaggtgcttccgaaacattccttgttatatgaatattttacagtttacaacgagctgaccaaggttaaatacgtgacggaaggaatgcgcaagcccgcttttcttagcggtgagcaaaaaaaggcgatcgtcgacctgttattcaaaacgaatcgtaaggtgactgtaaagcaactcaaagaagattacttcaaaaagattgagtgcttcgacagcgtcgaaatctctggggtagaggatcggtttaacgcaagtttaggtacctaccatgacctgcttaaaatcattaaggataaagacttcttagataatgaagagaacgaagatattctcgaggacatcgtcttgacgttaaccttatttgaggatcgtgaaatgattgaggaacgcctcaaaacttatgcccacctgttcgacgataaggtgatgaagcagctgaaacgtcggcgctacacaggatggggccgcttgagtcgcaaacttattaacggaatccgtgacaagcaatccggcaaaacgattctggatttcttgaagtcggacggatttgctaatcgcaacttcatgcagttgatccatgatgactccctgacttttaaagaggatattcaaaaggcgcaggttagtggtcaaggcgacagcttacacgaacacatcgcaaatttggctggttcgccggccattaaaaaggggatcctccagaccgtgaaagttgtagatgagcttgttaaggtcatgggtcgtcataagcccgaaaacatcgtgattgaaatggcgcgggagaatcaaacgacccagaaaggacaaaagaatagccgtgaacggatgaagcggatcgaggaaggcattaaagagctggggtctcaaatcttgaaggaacaccctgtggagaacactcagctccaaaatgaaaaactttacctgtactatttgcagaacggacgcgatatgtacgtggaccaagagttggatattaatcggctgagtgactacgacgttgatcatatcgtcccgcagagcttcctcaaagacgattctattgacaataaggtactgacgcgctctgataaaaaccgtggtaagtcggacaacgtgccctccgaagaggttgtgaaaaagatgaaaaattattggcgccagcttttaaacgcgaagctgatcacacaacgtaaattcgataatttgaccaaggctgaacggggtggcctgagcgagttagataaggcaggatttattaaacgccagttagtggagactcgtcaaatcaccaaacatgtcgcgcagattttggacagccggatgaacaccaagtacgatgaaaatgacaaactgatccgtgaggtgaaagtcattactctgaagtccaaattagttagtgatttccggaaggactttcaattctacaaagtccgtgaaattaataactatcatcacgcacatgacgcgtacctgaatgcagtggttgggaccgcccttatcaagaaatatcctaagctggagtcggagtttgtctatggcgactataaggtatacgatgttcgcaaaatgattgcgaaatctgagcaggagatcggtaaggcaaccgcaaaatatttcttttactcaaacattatgaatttctttaagacagaaatcactctggccaacggggagattcgcaaacgtccgttgatcgaaacaaacggcgagactggcgaaattgtttgggacaaagggcgtgatttcgcgacggtgcgcaaggtactgagcatgcctcaagtcaatattgttaagaaaaccgaagtgcagacgggcgggttttccaaggaaagcatcttacccaaacgtaattcagataaacttattgcacgcaaaaaggactgggatccgaaaaagtatggaggcttcgacagtccaaccgtagcctactctgttctcgttgtagcgaaagtagaaaagggtaaatccaagaaactgaaatctgtcaaggagttgcttggaatcaccattatggagcgtagctccttcgagaagaacccgattgactttctggaagccaaaggatataaagaggtcaagaaagatcttatcattaagctgcctaagtattcactcttcgagctggaaaatggtcgtaaacgcatgctcgcttctgccggcgagttgcagaagggcaatgaattagcacttccatcaaagtacgttaacttcctgtatttggccagccattacgagaaactgaaggggtctccagaggacaacgaacagaaacaattatttgtagagcagcacaagcattatcttgatgaaatcattgagcaaatttccgaattcagtaaacgcgtaatcctggccgatgcaaacctcgacaaggtgctgagcgcttacaataagcatcgcgacaaacctatccgtgagcaggctgaaaatatcattcacctgttcacattaacgaacctgggcgctccggccgcttttaaatatttcgacacgacaatcgaccgtaagcgctataccagtacgaaagaagtgttggatgcgacccttattcaccagtcaattacaggattatatgagacccgtatcgaccttagccaattaggtggggatgcggccacaagccctagccggaagagaaagtgggaccaagtgtga

SEQ ID NO: 254 - DNA, 4173 bp, synthetic construct
  source 1..4173: mol_type = other DNA
atggacaaaaagtactctattggcctggatatcgggaccaacagcgtcgggtgggctgttatcaccgacgagtataaagtaccttcgaaaaagttcaaagtgctgggcaacaccgatcgccattcaatcaaaaagaacttgattggtgcgctgttgtttgactccggggaaaccgccgaggcgactcgccttaaacgtacagcacgtcgccggtacactcggcgtaagaatcgcatttgctatttgcaggaaatctttagcaacgagatggcaaaagtcgatgactcgtttttccaccgcctcgaggaaagctttctggtggaggaagacaaaaagcatgagcgtcacccgatcttcggcaacattgtcgatgaagtagcgtatcatgaaaaatacccaaccatttaccacttacgcaaaaagctggtggacagcactgacaaagctgatttgcgccttatctatttagccctggcacatatgattaagtttcgtggtcacttcctgatcgaaggagacttaaatcccgacaacagtgatgttgataaattgtttattcagcttgtccaaacttacaatcaactgttcgaggaaaacccgatcaatgcctccggtgtggatgcaaaagccattttaagtgcacgccttagcaagtcccgtcgcttagaaaaccttatcgcgcagctgcccggcgagaaaaagaatggtttgtttgggaaccttattgccttgagcttaggcctcaccccgaatttcaaaagtaatttcgatcttgcagaagacgccaaattacaactgtcgaaggatacttatgatgacgatctcgataatctgttagcgcagattggtgaccaatacgccgatctttttctggcggctaaaaatctgagcgacgccatcttgctttcggatattctccgcgttaacaccgaaatcacgaaagcgcctcttagtgccagcatgattaaacgttatgatgaacaccaccaggacctgaccttactcaaagcgttggttcgccagcaactgccagagaagtacaaagaaatcttctttgatcagtcaaagaatggttatgccggctatattgacgggggtgcaagccaagaggaattctacaaatttatcaagcctattctggagaaaatggatggcaccgaagagttattggtgaagcttaaccgtgaagacctcctgcggaaacagcgcacattcgataatggttcgatcccacaccaaatccatttgggggagttacacgctattttgcgtcgccaggaagacttttaccctttcctgaaggataaccgggagaaaattgagaagatccttacctttcgtattccgtattacgtaggccccttagcacggggtaatagccgtttcgcgtggatgacacggaagtcggaagagacgatcaccccgtggaacttcgaagaggtagtcgacaagggcgcatcagcgcagtcttttattgaacgtatgacgaatttcgataaaaacttgcccaatgagaaggtgcttccgaaacattccttgttatatgaatattttacagtttacaacgagctgaccaaggttaaatacgtgacggaaggaatgcgcaagcccgcttttcttagcggtgagcaaaaaaaggcgatcgtcgacctgttattcaaaacgaatcgtaaggtgactgtaaagcaactcaaagaagattacttcaaaaagattgagtgcttcgacagcgtcgaaatctctggggtagaggatcggtttaacgcaagtttaggtacctaccatgacctgcttaaaatcattaaggataaagacttcttagataatgaagagaacgaagatattctcgaggacatcgtcttgacgttaaccttatttgaggatcgtgaaatgattgaggaacgcctcaaaacttatgcccacctgttcgacgataaggtgatgaagcagctgaaacgtcggcgctacacaggatggggccgcttgagtcgcaaacttattaacggaatccgtgacaagcaatccggcaaaacgattctggatttcttgaagtcggacggatttgctaatcgcaacttcatgcagttgatccatgatgactccctgacttttaaagaggatattcaaaaggcgcaggttagtggtcaaggcgacagcttacacgaacacatcgcaaatttggctggttcgccggccattaaaaaggggatcctccagaccgtgaaagttgtagatgagcttgttaaggtcatgggtcgtcataagcccgaaaacatcgtgattgaaatggcgcgggagaatcaaacgacccagaaaggacaaaagaatagccgtgaacggatgaagcggatcgaggaaggcattaaagagctggggtctcaaatcttgaaggaacaccctgtggagaacactcagctccaaaatgaaaaactttacctgtactatttgcagaacggacgcgatatgtacgtggaccaagagttggatattaatcggctgagtgactacgacgttgatcatatcgtcccgcagagcttcctcaaagacgattctattgacaataaggtactgacgcgctctgataaaaaccgtggtaagtcggacaacgtgccctccgaagaggttgtgaaaaagatgaaaaattattggcgccagcttttaaacgcgaagctgatcacacaacgtaaattcgataatttgaccaaggctgaacggggtggcctgagcgagttagataaggcaggatttattaaacgccagttagtggagactcgtcaaatcaccaaacatgtcgcgcagattttggacagccggatgaacaccaagtacgatgaaaatgacaaactgatccgtgaggtgaaagtcattactctgaagtccaaattagttagtgatttccggaaggactttcaattctacaaagtccgtgaaattaataactatcatcacgcacatgacgcgtacctgaatgcagtggttgggaccgcccttatcaagaaatatcctaagctggagtcggagtttgtctatggcgactataaggtatacgatgttcgcaaaatgattgcgaaatctgagcaggagatcggtaaggcaaccgcaaaatatttcttttactcaaacattatgaatttctttaagacagaaatcactctggccaacggggagattcgcaaacgtccgttgatcgaaacaaacggcgagactggcgaaattgtttgggacaaagggcgtgatttcgcgacggtgcgcaaggtactgagcatgcctcaagtcaatattgttaagaaaaccgaagtgcagacgggcgggttttccaaggaaagcatcttacccaaacgtaattcagataaacttattgcacgcaaaaaggactgggatccgaaaaagtatggaggcttcgacagtccaaccgtagcctactctgttctcgttgtagcgaaagtagaaaagggtaaatccaagaaactgaaatctgtcaaggagttgcttggaatcaccattatggagcgtagctccttcgagaagaacccgattgactttctggaagccaaaggatataaagaggtcaagaaagatcttatcattaagctgcctaagtattcactcttcgagctggaaaatggtcgtaaacgcatgctcgcttctgccggcgagttgcagaagggcaatgaattagcacttccatcaaagtacgttaacttcctgtatttggccagccattacgagaaactgaaggggtctccagaggacaacgaacagaaacaattatttgtagagcagcacaagcattatcttgatgaaatcattgagcaaatttccgaattcagtaaacgcgtaatcctggccgatgcaaacctcgacaaggtgctgagcgcttacaataagcatcgcgacaaacctatccgtgagcaggctgaaaatatcattcacctgttcacattaacgaacctgggcgctccggccgcttttaaatatttcgacacgacaatcgaccgtaagcgctataccagtacgaaagaagtgttggatgcgacccttattcaccagtcaattacaggattatatgagacccgtatcgaccttagccaattaggtggggatgcggccgccgtgaaaagacctgccgccacaaagaaagccggccaggccaagaagaagaagctggactga

SEQ ID NO: 255 - DNA, 4149 bp, synthetic construct
  source 1..4149: mol_type = other DNA
atggacaaaaagtactctattggcctggatatcgggaccaacagcgtcgggtgggctgttatcaccgacgagtataaagtaccttcgaaaaagttcaaagtgctgggcaacaccgatcgccattcaatcaaaaagaacttgattggtgcgctgttgtttgactccggggaaaccgccgaggcgactcgccttaaacgtacagcacgtcgccggtacactcggcgtaagaatcgcatttgctatttgcaggaaatctttagcaacgagatggcaaaagtcgatgactcgtttttccaccgcctcgaggaaagctttctggtggaggaagacaaaaagcatgagcgtcacccgatcttcggcaacattgtcgatgaagtagcgtatcatgaaaaatacccaaccatttaccacttacgcaaaaagctggtggacagcactgacaaagctgatttgcgccttatctatttagccctggcacatatgattaagtttcgtggtcacttcctgatcgaaggagacttaaatcccgacaacagtgatgttgataaattgtttattcagcttgtccaaacttacaatcaactgttcgaggaaaacccgatcaatgcctccggtgtggatgcaaaagccattttaagtgcacgccttagcaagtcccgtcgcttagaaaaccttatcgcgcagctgcccggcgagaaaaagaatggtttgtttgggaaccttattgccttgagcttaggcctcaccccgaatttcaaaagtaatttcgatcttgcagaagacgccaaattacaactgtcgaaggatacttatgatgacgatctcgataatctgttagcgcagattggtgaccaatacgccgatctttttctggcggctaaaaatctgagcgacgccatcttgctttcggatattctccgcgttaacaccgaaatcacgaaagcgcctcttagtgccagcatgattaaacgttatgatgaacaccaccaggacctgaccttactcaaagcgttggttcgccagcaactgccagagaagtacaaagaaatcttctttgatcagtcaaagaatggttatgccggctatattgacgggggtgcaagccaagaggaattctacaaatttatcaagcctattctggagaaaatggatggcaccgaagagttattggtgaagcttaaccgtgaagacctcctgcggaaacagcgcacattcgataatggttcgatcccacaccaaatccatttgggggagttacacgctattttgcgtcgccaggaagacttttaccctttcctgaaggataaccgggagaaaattgagaagatccttacctttcgtattccgtattacgtaggccccttagcacggggtaatagccgtttcgcgtggatgacacggaagtcggaagagacgatcaccccgtggaacttcgaagaggtagtcgacaagggcgcatcagcgcagtcttttattgaacgtatgacgaatttcgataaaaacttgcccaatgagaaggtgcttccgaaacattccttgttatatgaatattttacagtttacaacgagctgaccaaggttaaatacgtgacggaaggaatgcgcaagcccgcttttcttagcggtgagcaaaaaaaggcgatcgtcgacctgttattcaaaacgaatcgtaaggtgactgtaaagcaactcaaagaagattacttcaaaaagattgagtgcttcgacagcgtcgaaatctctggggtagaggatcggtttaacgcaagtttaggtacctaccatgacctgcttaaaatcattaaggataaagacttcttagataatgaagagaacgaagatattctcgaggacatcgtcttgacgttaaccttatttgaggatcgtgaaatgattgaggaacgcctcaaaacttatgcccacctgttcgacgataaggtgatgaagcagctgaaacgtcggcgctacacaggatggggccgcttgagtcgcaaacttattaacggaatccgtgacaagcaatccggcaaaacgattctggatttcttgaagtcggacggatttgctaatcgcaacttcatgcagttgatccatgatgactccctgacttttaaagaggatattcaaaaggcgcaggttagtggtcaaggcgacagcttacacgaacacatcgcaaatttggctggttcgccggccattaaaaaggggatcctccagaccgtgaaagttgtagatgagcttgttaaggtcatgggtcgtcataagcccgaaaacatcgtgattgaaatggcgcgggagaatcaaacgacccagaaaggacaaaagaatagccgtgaacggatgaagcggatcgaggaaggcattaaagagctggggtctcaaatcttgaaggaacaccctgtggagaacactcagctccaaaatgaaaaactttacctgtactatttgcagaacggacgcgatatgtacgtggaccaagagttggatattaatcggctgagtgactacgacgttgatcatatcgtcccgcagagcttcctcaaagacgattctattgacaataaggtactgacgcgctctgataaaaaccgtggtaagtcggacaacgtgccctccgaagaggttgtgaaaaagatgaaaaattattggcgccagcttttaaacgcgaagctgatcacacaacgtaaattcgataatttgaccaaggctgaacggggtggcctgagcgagttagataaggcaggatttattaaacgccagttagtggagactcgtcaaatcaccaaacatgtcgcgcagattttggacagccggatgaacaccaagtacgatgaaaatgacaaactgatccgtgaggtgaaagtcattactctgaagtccaaattagttagtgatttccggaaggactttcaattctacaaagtccgtgaaattaataactatcatcacgcacatgacgcgtacctgaatgcagtggttgggaccgcccttatcaagaaatatcctaagctggagtcggagtttgtctatggcgactataaggtatacgatgttcgcaaaatgattgcgaaatctgagcaggagatcggtaaggcaaccgcaaaatatttcttttactcaaacattatgaatttctttaagacagaaatcactctggccaacggggagattcgcaaacgtccgttgatcgaaacaaacggcgagactggcgaaattgtttgggacaaagggcgtgatttcgcgacggtgcgcaaggtactgagcatgcctcaagtcaatattgttaagaaaaccgaagtgcagacgggcgggttttccaaggaaagcatcttacccaaacgtaattcagataaacttattgcacgcaaaaaggactgggatccgaaaaagtatggaggcttcgacagtccaaccgtagcctactctgttctcgttgtagcgaaagtagaaaagggtaaatccaagaaactgaaatctgtcaaggagttgcttggaatcaccattatggagcgtagctccttcgagaagaacccgattgactttctggaagccaaaggatataaagaggtcaagaaagatcttatcattaagctgcctaagtattcactcttcgagctggaaaatggtcgtaaacgcatgctcgcttctgccggcgagttgcagaagggcaatgaattagcacttccatcaaagtacgttaacttcctgtatttggccagccattacgagaaactgaaggggtctccagaggacaacgaacagaaacaattatttgtagagcagcacaagcattatcttgatgaaatcattgagcaaatttccgaattcagtaaacgcgtaatcctggccgatgcaaacctcgacaaggtgctgagcgcttacaataagcatcgcgacaaacctatccgtgagcaggctgaaaatatcattcacctgttcacattaacgaacctgggcgctccggccgcttttaaatatttcgacacgacaatcgaccgtaagcgctataccagtacgaaagaagtgttggatgcgacccttattcaccagtcaattacaggattatatgagacccgtatcgaccttagccaattaggtggggatgcggcccctatcctgggcaagagaaagcggcacctgtttctgtga

SEQ ID NO: 256 - DNA, 4140 bp, synthetic construct
  source 1..4140: mol_type = other DNA
atggacaaaaagtactctattggcctggatatcgggaccaacagcgtcgggtgggctgttatcaccgacgagtataaagtaccttcgaaaaagttcaaagtgctgggcaacaccgatcgccattcaatcaaaaagaacttgattggtgcgctgttgtttgactccggggaaaccgccgaggcgactcgccttaaacgtacagcacgtcgccggtacactcggcgtaagaatcgcatttgctatttgcaggaaatctttagcaacgagatggcaaaagtcgatgactcgtttttccaccgcctcgaggaaagctttctggtggaggaagacaaaaagcatgagcgtcacccgatcttcggcaacattgtcgatgaagtagcgtatcatgaaaaatacccaaccatttaccacttacgcaaaaagctggtggacagcactgacaaagctgatttgcgccttatctatttagccctggcacatatgattaagtttcgtggtcacttcctgatcgaaggagacttaaatcccgacaacagtgatgttgataaattgtttattcagcttgtccaaacttacaatcaactgttcgaggaaaacccgatcaatgcctccggtgtggatgcaaaagccattttaagtgcacgccttagcaagtcccgtcgcttagaaaaccttatcgcgcagctgcccggcgagaaaaagaatggtttgtttgggaaccttattgccttgagcttaggcctcaccccgaatttcaaaagtaatttcgatcttgcagaagacgccaaattacaactgtcgaaggatacttatgatgacgatctcgataatctgttagcgcagattggtgaccaatacgccgatctttttctggcggctaaaaatctgagcgacgccatcttgctttcggatattctccgcgttaacaccgaaatcacgaaagcgcctcttagtgccagcatgattaaacgttatgatgaacaccaccaggacctgaccttactcaaagcgttggttcgccagcaactgccagagaagtacaaagaaatcttctttgatcagtcaaagaatggttatgccggctatattgacgggggtgcaagccaagaggaattctacaaatttatcaagcctattctggagaaaatggatggcaccgaagagttattggtgaagcttaaccgtgaagacctcctgcggaaacagcgcacattcgataatggttcgatcccacaccaaatccatttgggggagttacacgctattttgcgtcgccaggaagacttttaccctttcctgaaggataaccgggagaaaattgagaagatccttacctttcgtattccgtattacgtaggccccttagcacggggtaatagccgtttcgcgtggatgacacggaagtcggaagagacgatcaccccgtggaacttcgaagaggtagtcgacaagggcgcatcagcgcagtcttttattgaacgtatgacgaatttcgataaaaacttgcccaatgagaaggtgcttccgaaacattccttgttatatgaatattttacagtttacaacgagctgaccaaggttaaatacgtgacggaaggaatgcgcaagcccgcttttcttagcggtgagcaaaaaaaggcgatcgtcgacctgttattcaaaacgaatcgtaaggtgactgtaaagcaactcaaagaagattacttcaaaaagattgagtgcttcgacagcgtcgaaatctctggggtagaggatcggtttaacgcaagtttaggtacctaccatgacctgcttaaaatcattaaggataaagacttcttagataatgaagagaacgaagatattctcgaggacatcgtcttgacgttaaccttatttgaggatcgtgaaatgattgaggaacgcctcaaaacttatgcccacctgttcgacgataaggtgatgaagcagctgaaacgtcggcgctacacaggatggggccgcttgagtcgcaaacttattaacggaatccgtgacaagcaatccggcaaaacgattctggatttcttgaagtcggacggatttgctaatcgcaacttcatgcagttgatccatgatgactccctgacttttaaagaggatattcaaaaggcgcaggttagtggtcaaggcgacagcttacacgaacacatcgcaaatttggctggttcgccggccattaaaaaggggatcctccagaccgtgaaagttgtagatgagcttgttaaggtcatgggtcgtcataagcccgaaaacatcgtgattgaaatggcgcgggagaatcaaacgacccagaaaggacaaaagaatagccgtgaacggatgaagcggatcgaggaaggcattaaagagctggggtctcaaatcttgaaggaacaccctgtggagaacactcagctccaaaatgaaaaactttacctgtactatttgcagaacggacgcgatatgtacgtggaccaagagttggatattaatcggctgagtgactacgacgttgatcatatcgtcccgcagagcttcctcaaagacgattctattgacaataaggtactgacgcgctctgataaaaaccgtggtaagtcggacaacgtgccctccgaagaggttgtgaaaaagatgaaaaattattggcgccagcttttaaacgcgaagctgatcacacaacgtaaattcgataatttgaccaaggctgaacggggtggcctgagcgagttagataaggcaggatttattaaacgccagttagtggagactcgtcaaatcaccaaacatgtcgcgcagattttggacagccggatgaacaccaagtacgatgaaaatgacaaactgatccgtgaggtgaaagtcattactctgaagtccaaattagttagtgatttccggaaggactttcaattctacaaagtccgtgaaattaataactatcatcacgcacatgacgcgtacctgaatgcagtggttgggaccgcccttatcaagaaatatcctaagctggagtcggagtttgtctatggcgactataaggtatacgatgttcgcaaaatgattgcgaaatctgagcaggagatcggtaaggcaaccgcaaaatatttcttttactcaaacattatgaatttctttaagacagaaatcactctggccaacggggagattcgcaaacgtccgttgatcgaaacaaacggcgagactggcgaaattgtttgggacaaagggcgtgatttcgcgacggtgcgcaaggtactgagcatgcctcaagtcaatattgttaagaaaaccgaagtgcagacgggcgggttttccaaggaaagcatcttacccaaacgtaattcagataaacttattgcacgcaaaaaggactgggatccgaaaaagtatggaggcttcgacagtccaaccgtagcctactctgttctcgttgtagcgaaagtagaaaagggtaaatccaagaaactgaaatctgtcaaggagttgcttggaatcaccattatggagcgtagctccttcgagaagaacccgattgactttctggaagccaaaggatataaagaggtcaagaaagatcttatcattaagctgcctaagtattcactcttcgagctggaaaatggtcgtaaacgcatgctcgcttctgccggcgagttgcagaagggcaatgaattagcacttccatcaaagtacgttaacttcctgtatttggccagccattacgagaaactgaaggggtctccagaggacaacgaacagaaacaattatttgtagagcagcacaagcattatcttgatgaaatcattgagcaaatttccgaattcagtaaacgcgtaatcctggccgatgcaaacctcgacaaggtgctgagcgcttacaataagcatcgcgacaaacctatccgtgagcaggctgaaaatatcattcacctgttcacattaacgaacctgggcgctccggccgcttttaaatatttcgacacgacaatcgaccgtaagcgctataccagtacgaaagaagtgttggatgcgacccttattcaccagtcaattacaggattatatgagacccgtatcgaccttagccaattaggtggggatgcggcccctgccgccaagagagtgaagctggattga

SEQ ID NO: 257 - DNA, 4188 bp, synthetic construct
  source 1..4188: mol_type = other DNA
atggacaaaaagtactctattggcctggatatcgggaccaacagcgtcgggtgggctgttatcaccgacgagtataaagtaccttcgaaaaagttcaaagtgctgggcaacaccgatcgccattcaatcaaaaagaacttgattggtgcgctgttgtttgactccggggaaaccgccgaggcgactcgccttaaacgtacagcacgtcgccggtacactcggcgtaagaatcgcatttgctatttgcaggaaatctttagcaacgagatggcaaaagtcgatgactcgtttttccaccgcctcgaggaaagctttctggtggaggaagacaaaaagcatgagcgtcacccgatcttcggcaacattgtcgatgaagtagcgtatcatgaaaaatacccaaccatttaccacttacgcaaaaagctggtggacagcactgacaaagctgatttgcgccttatctatttagccctggcacatatgattaagtttcgtggtcacttcctgatcgaaggagacttaaatcccgacaacagtgatgttgataaattgtttattcagcttgtccaaacttacaatcaactgttcgaggaaaacccgatcaatgcctccggtgtggatgcaaaagccattttaagtgcacgccttagcaagtcccgtcgcttagaaaaccttatcgcgcagctgcccggcgagaaaaagaatggtttgtttgggaaccttattgccttgagcttaggcctcaccccgaatttcaaaagtaatttcgatcttgcagaagacgccaaattacaactgtcgaaggatacttatgatgacgatctcgataatctgttagcgcagattggtgaccaatacgccgatctttttctggcggctaaaaatctgagcgacgccatcttgctttcggatattctccgcgttaacaccgaaatcacgaaagcgcctcttagtgccagcatgattaaacgttatgatgaacaccaccaggacctgaccttactcaaagcgttggttcgccagcaactgccagagaagtacaaagaaatcttctttgatcagtcaaagaatggttatgccggctatattgacgggggtgcaagccaagaggaattctacaaatttatcaagcctattctggagaaaatggatggcaccgaagagttattggtgaagcttaaccgtgaagacctcctgcggaaacagcgcacattcgataatggttcgatcccacaccaaatccatttgggggagttacacgctattttgcgtcgccaggaagacttttaccctttcctgaaggataaccgggagaaaattgagaagatccttacctttcgtattccgtattacgtaggccccttagcacggggtaatagccgtttcgcgtggatgacacggaagtcggaagagacgatcaccccgtggaacttcgaagaggtagtcgacaagggcgcatcagcgcagtcttttattgaacgtatgacgaatttcgataaaaacttgcccaatgagaaggtgcttccgaaacattccttgttatatgaatattttacagtttacaacgagctgaccaaggttaaatacgtgacggaaggaatgcgcaagcccgcttttcttagcggtgagcaaaaaaaggcgatcgtcgacctgttattcaaaacgaatcgtaaggtgactgtaaagcaactcaaagaagattacttcaaaaagattgagtgcttcgacagcgtcgaaatctctggggtagaggatcggtttaacgcaagtttaggtacctaccatgacctgcttaaaatcattaaggataaagacttcttagataatgaagagaacgaagatattctcgaggacatcgtcttgacgttaaccttatttgaggatcgtgaaatgattgaggaacgcctcaaaacttatgcccacctgttcgacgataaggtgatgaagcagctgaaacgtcggcgctacacaggatggggccgcttgagtcgcaaacttattaacggaatccgtgacaagcaatccggcaaaacgattctggatttcttgaagtcggacggatttgctaatcgcaacttcatgcagttgatccatgatgactccctgacttttaaagaggatattcaaaaggcgcaggttagtggtcaaggcgacagcttacacgaacacatcgcaaatttggctggttcgccggccattaaaaaggggatcctccagaccgtgaaagttgtagatgagcttgttaaggtcatgggtcgtcataagcccgaaaacatcgtgattgaaatggcgcgggagaatcaaacgacccagaaaggacaaaagaatagccgtgaacggatgaagcggatcgaggaaggcattaaagagctggggtctcaaatcttgaaggaacaccctgtggagaacactcagctccaaaatgaaaaactttacctgtactatttgcagaacggacgcgatatgtacgtggaccaagagttggatattaatcggctgagtgactacgacgttgatcatatcgtcccgcagagcttcctcaaagacgattctattgacaataaggtactgacgcgctctgataaaaaccgtggtaagtcggacaacgtgccctccgaagaggttgtgaaaaagatgaaaaattattggcgccagcttttaaacgcgaagctgatcacacaacgtaaattcgataatttgaccaaggctgaacggggtggcctgagcgagttagataaggcaggatttattaaacgccagttagtggagactcgtcaaatcaccaaacatgtcgcgcagattttggacagccggatgaacaccaagtacgatgaaaatgacaaactgatccgtgaggtgaaagtcattactctgaagtccaaattagttagtgatttccggaaggactttcaattctacaaagtccgtgaaattaataactatcatcacgcacatgacgcgtacctgaatgcagtggttgggaccgcccttatcaagaaatatcctaagctggagtcggagtttgtctatggcgactataaggtatacgatgttcgcaaaatgattgcgaaatctgagcaggagatcggtaaggcaaccgcaaaatatttcttttactcaaacattatgaatttctttaagacagaaatcactctggccaacggggagattcgcaaacgtccgttgatcgaaacaaacggcgagactggcgaaattgtttgggacaaagggcgtgatttcgcgacggtgcgcaaggtactgagcatgcctcaagtcaatattgttaagaaaaccgaagtgcagacgggcgggttttccaaggaaagcatcttacccaaacgtaattcagataaacttattgcacgcaaaaaggactgggatccgaaaaagtatggaggcttcgacagtccaaccgtagcctactctgttctcgttgtagcgaaagtagaaaagggtaaatccaagaaactgaaatctgtcaaggagttgcttggaatcaccattatggagcgtagctccttcgagaagaacccgattgactttctggaagccaaaggatataaagaggtcaagaaagatcttatcattaagctgcctaagtattcactcttcgagctggaaaatggtcgtaaacgcatgctcgcttctgccggcgagttgcagaagggcaatgaattagcacttccatcaaagtacgttaacttcctgtatttggccagccattacgagaaactgaaggggtctccagaggacaacgaacagaaacaattatttgtagagcagcacaagcattatcttgatgaaatcattgagcaaatttccgaattcagtaaacgcgtaatcctggccgatgcaaacctcgacaaggtgctgagcgcttacaataagcatcgcgacaaacctatccgtgagcaggctgaaaatatcattcacctgttcacattaacgaacctgggcgctccggccgcttttaaatatttcgacacgacaatcgaccgtaagcgctataccagtacgaaagaagtgttggatgcgacccttattcaccagtcaattacaggattatatgagacccgtatcgaccttagccaattaggtggggatgcggccatgagcagacggcggaaggccaatcctaccaagctgagcgagaacgccaagaaactggccaaagaggtggaaaactga

SEQ ID NO: 258 - DNA, 4149 bp, synthetic construct
  source 1..4149: mol_type = other DNA
atggacaaaaagtactctattggcctggatatcgggaccaacagcgtcgggtgggctgttatcaccgacgagtataaagtaccttcgaaaaagttcaaagtgctgggcaacaccgatcgccattcaatcaaaaagaacttgattggtgcgctgttgtttgactccggggaaaccgccgaggcgactcgccttaaacgtacagcacgtcgccggtacactcggcgtaagaatcgcatttgctatttgcaggaaatctttagcaacgagatggcaaaagtcgatgactcgtttttccaccgcctcgaggaaagctttctggtggaggaagacaaaaagcatgagcgtcacccgatcttcggcaacattgtcgatgaagtagcgtatcatgaaaaatacccaaccatttaccacttacgcaaaaagctggtggacagcactgacaaagctgatttgcgccttatctatttagccctggcacatatgattaagtttcgtggtcacttcctgatcgaaggagacttaaatcccgacaacagtgatgttgataaattgtttattcagcttgtccaaacttacaatcaactgttcgaggaaaacccgatcaatgcctccggtgtggatgcaaaagccattttaagtgcacgccttagcaagtcccgtcgcttagaaaaccttatcgcgcagctgcccggcgagaaaaagaatggtttgtttgggaaccttattgccttgagcttaggcctcaccccgaatttcaaaagtaatttcgatcttgcagaagacgccaaattacaactgtcgaaggatacttatgatgacgatctcgataatctgttagcgcagattggtgaccaatacgccgatctttttctggcggctaaaaatctgagcgacgccatcttgctttcggatattctccgcgttaacaccgaaatcacgaaagcgcctcttagtgccagcatgattaaacgttatgatgaacaccaccaggacctgaccttactcaaagcgttggttcgccagcaactgccagagaagtacaaagaaatcttctttgatcagtcaaagaatggttatgccggctatattgacgggggtgcaagccaagaggaattctacaaatttatcaagcctattctggagaaaatggatggcaccgaagagttattggtgaagcttaaccgtgaagacctcctgcggaaacagcgcacattcgataatggttcgatcccacaccaaatccatttgggggagttacacgctattttgcgtcgccaggaagacttttaccctttcctgaaggataaccgggagaaaattgagaagatccttacctttcgtattccgtattacgtaggccccttagcacggggtaatagccgtttcgcgtggatgacacggaagtcggaagagacgatcaccccgtggaacttcgaagaggtagtcgacaagggcgcatcagcgcagtcttttattgaacgtatgacgaatttcgataaaaacttgcccaatgagaaggtgcttccgaaacattccttgttatatgaatattttacagtttacaacgagctgaccaaggttaaatacgtgacggaaggaatgcgcaagcccgcttttcttagcggtgagcaaaaaaaggcgatcgtcgacctgttattcaaaacgaatcgtaaggtgactgtaaagcaactcaaagaagattacttcaaaaagattgagtgcttcgacagcgtcgaaatctctggggtagaggatcggtttaacgcaagtttaggtacctaccatgacctgcttaaaatcattaaggataaagacttcttagataatgaagagaacgaagatattctcgaggacatcgtcttgacgttaaccttatttgaggatcgtgaaatgattgaggaacgcctcaaaacttatgcccacctgttcgacgataaggtgatgaagcagctgaaacgtcggcgctacacaggatggggccgcttgagtcgcaaacttattaacggaatccgtgacaagcaatccggcaaaacgattctggatttcttgaagtcggacggatttgctaatcgcaacttcatgcagttgatccatgatgactccctgacttttaaagaggatattcaaaaggcgcaggttagtggtcaaggcgacagcttacacgaacacatcgcaaatttggctggttcgccggccattaaaaaggggatcctccagaccgtgaaagttgtagatgagcttgttaaggtcatgggtcgtcataagcccgaaaacatcgtgattgaaatggcgcgggagaatcaaacgacccagaaaggacaaaagaatagccgtgaacggatgaagcggatcgaggaaggcattaaagagctggggtctcaaatcttgaaggaacaccctgtggagaacactcagctccaaaatgaaaaactttacctgtactatttgcagaacggacgcgatatgtacgtggaccaagagttggatattaatcggctgagtgactacgacgttgatcatatcgtcccgcagagcttcctcaaagacgattctattgacaataaggtactgacgcgctctgataaaaaccgtggtaagtcggacaacgtgccctccgaagaggttgtgaaaaagatgaaaaattattggcgccagcttttaaacgcgaagctgatcacacaacgtaaattcgataatttgaccaaggctgaacggggtggcctgagcgagttagataaggcaggatttattaaacgccagttagtggagactcgtcaaatcaccaaacatgtcgcgcagattttggacagccggatgaacaccaagtacgatgaaaatgacaaactgatccgtgaggtgaaagtcattactctgaagtccaaattagttagtgatttccggaaggactttcaattctacaaagtccgtgaaattaataactatcatcacgcacatgacgcgtacctgaatgcagtggttgggaccgcccttatcaagaaatatcctaagctggagtcggagtttgtctatggcgactataaggtatacgatgttcgcaaaatgattgcgaaatctgagcaggagatcggtaaggcaaccgcaaaatatttcttttactcaaacattatgaatttctttaagacagaaatcactctggccaacggggagattcgcaaacgtccgttgatcgaaacaaacggcgagactggcgaaattgtttgggacaaagggcgtgatttcgcgacggtgcgcaaggtactgagcatgcctcaagtcaatattgttaagaaaaccgaagtgcagacgggcgggttttccaaggaaagcatcttacccaaacgtaattcagataaacttattgcacgcaaaaaggactgggatccgaaaaagtatggaggcttcgacagtccaaccgtagcctactctgttctcgttgtagcgaaagtagaaaagggtaaatccaagaaactgaaatctgtcaaggagttgcttggaatcaccattatggagcgtagctccttcgagaagaacccgattgactttctggaagccaaaggatataaagaggtcaagaaagatcttatcattaagctgcctaagtattcactcttcgagctggaaaatggtcgtaaacgcatgctcgcttctgccggcgagttgcagaagggcaatgaattagcacttccatcaaagtacgttaacttcctgtatttggccagccattacgagaaactgaaggggtctccagaggacaacgaacagaaacaattatttgtagagcagcacaagcattatcttgatgaaatcattgagcaaatttccgaattcagtaaacgcgtaatcctggccgatgcaaacctcgacaaggtgctgagcgcttacaataagcatcgcgacaaacctatccgtgagcaggctgaaaatatcattcacctgttcacattaacgaacctgggcgctccggccgcttttaaatatttcgacacgacaatcgaccgtaagcgctataccagtacgaaagaagtgttggatgcgacccttattcaccagtcaattacaggattatatgagacccgtatcgaccttagccaattaggtggggatgcggccaccctgggaaagagaaagcggatcagctgcgtgacctga

SEQ ID NO: 259 - DNA, 4140 bp, synthetic construct
  source 1..4140: mol_type = other DNA
atggacaaaaagtactctattggcctggatatcgggaccaacagcgtcgggtgggctgttatcaccgacgagtataaagtaccttcgaaaaagttcaaagtgctgggcaacaccgatcgccattcaatcaaaaagaacttgattggtgcgctgttgtttgactccggggaaaccgccgaggcgactcgccttaaacgtacagcacgtcgccggtacactcggcgtaagaatcgcatttgctatttgcaggaaatctttagcaacgagatggcaaaagtcgatgactcgtttttccaccgcctcgaggaaagctttctggtggaggaagacaaaaagcatgagcgtcacccgatcttcggcaacattgtcgatgaagtagcgtatcatgaaaaatacccaaccatttaccacttacgcaaaaagctggtggacagcactgacaaagctgatttgcgccttatctatttagccctggcacatatgattaagtttcgtggtcacttcctgatcgaaggagacttaaatcccgacaacagtgatgttgataaattgtttattcagcttgtccaaacttacaatcaactgttcgaggaaaacccgatcaatgcctccggtgtggatgcaaaagccattttaagtgcacgccttagcaagtcccgtcgcttagaaaaccttatcgcgcagctgcccggcgagaaaaagaatggtttgtttgggaaccttattgccttgagcttaggcctcaccccgaatttcaaaagtaatttcgatcttgcagaagacgccaaattacaactgtcgaaggatacttatgatgacgatctcgataatctgttagcgcagattggtgaccaatacgccgatctttttctggcggctaaaaatctgagcgacgccatcttgctttcggatattctccgcgttaacaccgaaatcacgaaagcgcctcttagtgccagcatgattaaacgttatgatgaacaccaccaggacctgaccttactcaaagcgttggttcgccagcaactgccagagaagtacaaagaaatcttctttgatcagtcaaagaatggttatgccggctatattgacgggggtgcaagccaagaggaattctacaaatttatcaagcctattctggagaaaatggatggcaccgaagagttattggtgaagcttaaccgtgaagacctcctgcggaaacagcgcacattcgataatggttcgatcccacaccaaatccatttgggggagttacacgctattttgcgtcgccaggaagacttttaccctttcctgaaggataaccgggagaaaattgagaagatccttacctttcgtattccgtattacgtaggccccttagcacggggtaatagccgtttcgcgtggatgacacggaagtcggaagagacgatcaccccgtggaacttcgaagaggtagtcgacaagggcgcatcagcgcagtcttttattgaacgtatgacgaatttcgataaaaacttgcccaatgagaaggtgcttccgaaacattccttgttatatgaatattttacagtttacaacgagctgaccaaggttaaatacgtgacggaaggaatgcgcaagcccgcttttcttagcggtgagcaaaaaaaggcgatcgtcgacctgttattcaaaacgaatcgtaaggtgactgtaaagcaactcaaagaagattacttcaaaaagattgagtgcttcgacagcgtcgaaatctctggggtagaggatcggtttaacgcaagtttaggtacctaccatgacctgcttaaaatcattaaggataaagacttcttagataatgaagagaacgaagatattctcgaggacatcgtcttgacgttaaccttatttgaggatcgtgaaatgattgaggaacgcctcaaaacttatgcccacctgttcgacgataaggtgatgaagcagctgaaacgtcggcgctacacaggatggggccgcttgagtcgcaaacttattaacggaatccgtgacaagcaatccggcaaaacgattctggatttcttgaagtcggacggatttgctaatcgcaacttcatgcagttgatccatgatgactccctgacttttaaagaggatattcaaaaggcgcaggttagtggtcaaggcgacagcttacacgaacacatcgcaaatttggctggttcgccggccattaaaaaggggatcctccagaccgtgaaagttgtagatgagcttgttaaggtcatgggtcgtcataagcccgaaaacatcgtgattgaaatggcgcgggagaatcaaacgacccagaaaggacaaaagaatagccgtgaacggatgaagcggatcgaggaaggcattaaagagctggggtctcaaatcttgaaggaacaccctgtggagaacactcagctccaaaatgaaaaactttacctgtactatttgcagaacggacgcgatatgtacgtggaccaagagttggatattaatcggctgagtgactacgacgttgatcatatcgtcccgcagagcttcctcaaagacgattctattgacaataaggtactgacgcgctctgataaaaaccgtggtaagtcggacaacgtgccctccgaagaggttgtgaaaaagatgaaaaattattggcgccagcttttaaacgcgaagctgatcacacaacgtaaattcgataatttgaccaaggctgaacggggtggcctgagcgagttagataaggcaggatttattaaacgccagttagtggagactcgtcaaatcaccaaacatgtcgcgcagattttggacagccggatgaacaccaagtacgatgaaaatgacaaactgatccgtgaggtgaaagtcattactctgaagtccaaattagttagtgatttccggaaggactttcaattctacaaagtccgtgaaattaataactatcatcacgcacatgacgcgtacctgaatgcagtggttgggaccgcccttatcaagaaatatcctaagctggagtcggagtttgtctatggcgactataaggtatacgatgttcgcaaaatgattgcgaaatctgagcaggagatcggtaaggcaaccgcaaaatatttcttttactcaaacattatgaatttctttaagacagaaatcactctggccaacggggagattcgcaaacgtccgttgatcgaaacaaacggcgagactggcgaaattgtttgggacaaagggcgtgatttcgcgacggtgcgcaaggtactgagcatgcctcaagtcaatattgttaagaaaaccgaagtgcagacgggcgggttttccaaggaaagcatcttacccaaacgtaattcagataaacttattgcacgcaaaaaggactgggatccgaaaaagtatggaggcttcgacagtccaaccgtagcctactctgttctcgttgtagcgaaagtagaaaagggtaaatccaagaaactgaaatctgtcaaggagttgcttggaatcaccattatggagcgtagctccttcgagaagaacccgattgactttctggaagccaaaggatataaagaggtcaagaaagatcttatcattaagctgcctaagtattcactcttcgagctggaaaatggtcgtaaacgcatgctcgcttctgccggcgagttgcagaagggcaatgaattagcacttccatcaaagtacgttaacttcctgtatttggccagccattacgagaaactgaaggggtctccagaggacaacgaacagaaacaattatttgtagagcagcacaagcattatcttgatgaaatcattgagcaaatttccgaattcagtaaacgcgtaatcctggccgatgcaaacctcgacaaggtgctgagcgcttacaataagcatcgcgacaaacctatccgtgagcaggctgaaaatatcattcacctgttcacattaacgaacctgggcgctccggccgcttttaaatatttcgacacgacaatcgaccgtaagcgctataccagtacgaaagaagtgttggatgcgacccttattcaccagtcaattacaggattatatgagacccgtatcgaccttagccaattaggtggggatgcggccaagctgaagatcaagcggcccgtgaagtga

SEQ ID NO: 260 - DNA, 4149 bp, synthetic construct
  source 1..4149: mol_type = other DNA
atggacaaaaagtactctattggcctggatatcgggaccaacagcgtcgggtgggctgttatcaccgacgagtataaagtaccttcgaaaaagttcaaagtgctgggcaacaccgatcgccattcaatcaaaaagaacttgattggtgcgctgttgtttgactccggggaaaccgccgaggcgactcgccttaaacgtacagcacgtcgccggtacactcggcgtaagaatcgcatttgctatttgcaggaaatctttagcaacgagatggcaaaagtcgatgactcgtttttccaccgcctcgaggaaagctttctggtggaggaagacaaaaagcatgagcgtcacccgatcttcggcaacattgtcgatgaagtagcgtatcatgaaaaatacccaaccatttaccacttacgcaaaaagctggtggacagcactgacaaagctgatttgcgccttatctatttagccctggcacatatgattaagtttcgtggtcacttcctgatcgaaggagacttaaatcccgacaacagtgatgttgataaattgtttattcagcttgtccaaacttacaatcaactgttcgaggaaaacccgatcaatgcctccggtgtggatgcaaaagccattttaagtgcacgccttagcaagtcccgtcgcttagaaaaccttatcgcgcagctgcccggcgagaaaaagaatggtttgtttgggaaccttattgccttgagcttaggcctcaccccgaatttcaaaagtaatttcgatcttgcagaagacgccaaattacaactgtcgaaggatacttatgatgacgatctcgataatctgttagcgcagattggtgaccaatacgccgatctttttctggcggctaaaaatctgagcgacgccatcttgctttcggatattctccgcgttaacaccgaaatcacgaaagcgcctcttagtgccagcatgattaaacgttatgatgaacaccaccaggacctgaccttactcaaagcgttggttcgccagcaactgccagagaagtacaaagaaatcttctttgatcagtcaaagaatggttatgccggctatattgacgggggtgcaagccaagaggaattctacaaatttatcaagcctattctggagaaaatggatggcaccgaagagttattggtgaagcttaaccgtgaagacctcctgcggaaacagcgcacattcgataatggttcgatcccacaccaaatccatttgggggagttacacgctattttgcgtcgccaggaagacttttaccctttcctgaaggataaccgggagaaaattgagaagatccttacctttcgtattccgtattacgtaggccccttagcacggggtaatagccgtttcgcgtggatgacacggaagtcggaagagacgatcaccccgtggaacttcgaagaggtagtcgacaagggcgcatcagcgcagtcttttattgaacgtatgacgaatttcgataaaaacttgcccaatgagaaggtgcttccgaaacattccttgttatatgaatattttacagtttacaacgagctgaccaaggttaaatacgtgacggaaggaatgcgcaagcccgcttttcttagcggtgagcaaaaaaaggcgatcgtcgacctgttattcaaaacgaatcgtaaggtgactgtaaagcaactcaaagaagattacttcaaaaagattgagtgcttcgacagcgtcgaaatctctggggtagaggatcggtttaacgcaagtttaggtacctaccatgacctgcttaaaatcattaaggataaagacttcttagataatgaagagaacgaagatattctcgaggacatcgtcttgacgttaaccttatttgaggatcgtgaaatgattgaggaacgcctcaaaacttatgcccacctgttcgacgataaggtgatgaagcagctgaaacgtcggcgctacacaggatggggccgcttgagtcgcaaacttattaacggaatccgtgacaagcaatccggcaaaacgattctggatttcttgaagtcggacggatttgctaatcgcaacttcatgcagttgatccatgatgactccctgacttttaaagaggatattcaaaaggcgcaggttagtggtcaaggcgacagcttacacgaacacatcgcaaatttggctggttcgccggccattaaaaaggggatcctccagaccgtgaaagttgtagatgagcttgttaaggtcatgggtcgtcataagcccgaaaacatcgtgattgaaatggcgcgggagaatcaaacgacccagaaaggacaaaagaatagccgtgaacggatgaagcggatcgaggaaggcattaaagagctggggtctcaaatcttgaaggaacaccctgtggagaacactcagctccaaaatgaaaaactttacctgtactatttgcagaacggacgcgatatgtacgtggaccaagagttggatattaatcggctgagtgactacgacgttgatcatatcgtcccgcagagcttcctcaaagacgattctattgacaataaggtactgacgcgctctgataaaaaccgtggtaagtcggacaacgtgccctccgaagaggttgtgaaaaagatgaaaaattattggcgccagcttttaaacgcgaagctgatcacacaacgtaaattcgataatttgaccaaggctgaacggggtggcctgagcgagttagataaggcaggatttattaaacgccagttagtggagactcgtcaaatcaccaaacatgtcgcgcagattttggacagccggatgaacaccaagtacgatgaaaatgacaaactgatccgtgaggtgaaagtcattactctgaagtccaaattagttagtgatttccggaaggactttcaattctacaaagtccgtgaaattaataactatcatcacgcacatgacgcgtacctgaatgcagtggttgggaccgcccttatcaagaaatatcctaagctggagtcggagtttgtctatggcgactataaggtatacgatgttcgcaaaatgattgcgaaatctgagcaggagatcggtaaggcaaccgcaaaatatttcttttactcaaacattatgaatttctttaagacagaaatcactctggccaacggggagattcgcaaacgtccgttgatcgaaacaaacggcgagactggcgaaattgtttgggacaaagggcgtgatttcgcgacggtgcgcaaggtactgagcatgcctcaagtcaatattgttaagaaaaccgaagtgcagacgggcgggttttccaaggaaagcatcttacccaaacgtaattcagataaacttattgcacgcaaaaaggactgggatccgaaaaagtatggaggcttcgacagtccaaccgtagcctactctgttctcgttgtagcgaaagtagaaaagggtaaatccaagaaactgaaatctgtcaaggagttgcttggaatcaccattatggagcgtagctccttcgagaagaacccgattgactttctggaagccaaaggatataaagaggtcaagaaagatcttatcattaagctgcctaagtattcactcttcgagctggaaaatggtcgtaaacgcatgctcgcttctgccggcgagttgcagaagggcaatgaattagcacttccatcaaagtacgttaacttcctgtatttggccagccattacgagaaactgaaggggtctccagaggacaacgaacagaaacaattatttgtagagcagcacaagcattatcttgatgaaatcattgagcaaatttccgaattcagtaaacgcgtaatcctggccgatgcaaacctcgacaaggtgctgagcgcttacaataagcatcgcgacaaacctatccgtgagcaggctgaaaatatcattcacctgttcacattaacgaacctgggcgctccggccgcttttaaatatttcgacacgacaatcgaccgtaagcgctataccagtacgaaagaagtgttggatgcgacccttattcaccagtcaattacaggattatatgagacccgtatcgaccttagccaattaggtggggatgcggccagagtgctgggcaagcgcaagagagaggacagaccttga

SEQ ID NO: 261 - DNA, 4149 bp, synthetic construct
  source 1..4149: mol_type = other DNA
atggacaaaaagtactctattggcctggatatcgggaccaacagcgtcgggtgggctgttatcaccgacgagtataaagtaccttcgaaaaagttcaaagtgctgggcaacaccgatcgccattcaatcaaaaagaacttgattggtgcgctgttgtttgactccggggaaaccgccgaggcgactcgccttaaacgtacagcacgtcgccggtacactcggcgtaagaatcgcatttgctatttgcaggaaatctttagcaacgagatggcaaaagtcgatgactcgtttttccaccgcctcgaggaaagctttctggtggaggaagacaaaaagcatgagcgtcacccgatcttcggcaacattgtcgatgaagtagcgtatcatgaaaaatacccaaccatttaccacttacgcaaaaagctggtggacagcactgacaaagctgatttgcgccttatctatttagccctggcacatatgattaagtttcgtggtcacttcctgatcgaaggagacttaaatcccgacaacagtgatgttgataaattgtttattcagcttgtccaaacttacaatcaactgttcgaggaaaacccgatcaatgcctccggtgtggatgcaaaagccattttaagtgcacgccttagcaagtcccgtcgcttagaaaaccttatcgcgcagctgcccggcgagaaaaagaatggtttgtttgggaaccttattgccttgagcttaggcctcaccccgaatttcaaaagtaatttcgatcttgcagaagacgccaaattacaactgtcgaaggatacttatgatgacgatctcgataatctgttagcgcagattggtgaccaatacgccgatctttttctggcggctaaaaatctgagcgacgccatcttgctttcggatattctccgcgttaacaccgaaatcacgaaagcgcctcttagtgccagcatgattaaacgttatgatgaacaccaccaggacctgaccttactcaaagcgttggttcgccagcaactgccagagaagtacaaagaaatcttctttgatcagtcaaagaatggttatgccggctatattgacgggggtgcaagccaagaggaattctacaaatttatcaagcctattctggagaaaatggatggcaccgaagagttattggtgaagcttaaccgtgaagacctcctgcggaaacagcgcacattcgataatggttcgatcccacaccaaatccatttgggggagttacacgctattttgcgtcgccaggaagacttttaccctttcctgaaggataaccgggagaaaattgagaagatccttacctttcgtattccgtattacgtaggccccttagcacggggtaatagccgtttcgcgtggatgacacggaagtcggaagagacgatcaccccgtggaacttcgaagaggtagtcgacaagggcgcatcagcgcagtcttttattgaacgtatgacgaatttcgataaaaacttgcccaatgagaaggtgcttccgaaacattccttgttatatgaatattttacagtttacaacgagctgaccaaggttaaatacgtgacggaaggaatgcgcaagcccgcttttcttagcggtgagcaaaaaaaggcgatcgtcgacctgttattcaaaacgaatcgtaaggtgactgtaaagcaactcaaagaagattacttcaaaaagattgagtgcttcgacagcgtcgaaatctctggggtagaggatcggtttaacgcaagtttaggtacctaccatgacctgcttaaaatcattaaggataaagacttcttagataatgaagagaacgaagatattctcgaggacatcgtcttgacgttaaccttatttgaggatcgtgaaatgattgaggaacgcctcaaaacttatgcccacctgttcgacgataaggtgatgaagcagctgaaacgtcggcgctacacaggatggggccgcttgagtcgcaaacttattaacggaatccgtgacaagcaatccggcaaaacgattctggatttcttgaagtcggacggatttgctaatcgcaacttcatgcagttgatccatgatgactccctgacttttaaagaggatattcaaaaggcgcaggttagtggtcaaggcgacagcttacacgaacacatcgcaaatttggctggttcgccggccattaaaaaggggatcctccagaccgtgaaagttgtagatgagcttgttaaggtcatgggtcgtcataagcccgaaaacatcgtgattgaaatggcgcgggagaatcaaacgacccagaaaggacaaaagaatagccgtgaacggatgaagcggatcgaggaaggcattaaagagctggggtctcaaatcttgaaggaacaccctgtggagaacactcagctccaaaatgaaaaactttacctgtactatttgcagaacggacgcgatatgtacgtggaccaagagttggatattaatcggctgagtgactacgacgttgatcatatcgtcccgcagagcttcctcaaagacgattctattgacaataaggtactgacgcgctctgataaaaaccgtggtaagtcggacaacgtgccctccgaagaggttgtgaaaaagatgaaaaattattggcgccagcttttaaacgcgaagctgatcacacaacgtaaattcgataatttgaccaaggctgaacggggtggcctgagcgagttagataaggcaggatttattaaacgccagttagtggagactcgtcaaatcaccaaacatgtcgcgcagattttggacagccggatgaacaccaagtacgatgaaaatgacaaactgatccgtgaggtgaaagtcattactctgaagtccaaattagttagtgatttccggaaggactttcaattctacaaagtccgtgaaattaataactatcatcacgcacatgacgcgtacctgaatgcagtggttgggaccgcccttatcaagaaatatcctaagctggagtcggagtttgtctatggcgactataaggtatacgatgttcgcaaaatgattgcgaaatctgagcaggagatcggtaaggcaaccgcaaaatatttcttttactcaaacattatgaatttctttaagacagaaatcactctggccaacggggagattcgcaaacgtccgttgatcgaaacaaacggcgagactggcgaaattgtttgggacaaagggcgtgatttcgcgacggtgcgcaaggtactgagcatgcctcaagtcaatattgttaagaaaaccgaagtgcagacgggcgggttttccaaggaaagcatcttacccaaacgtaattcagataaacttattgcacgcaaaaaggactgggatccgaaaaagtatggaggcttcgacagtccaaccgtagcctactctgttctcgttgtagcgaaagtagaaaagggtaaatccaagaaactgaaatctgtcaaggagttgcttggaatcaccattatggagcgtagctccttcgagaagaacccgattgactttctggaagccaaaggatataaagaggtcaagaaagatcttatcattaagctgcctaagtattcactcttcgagctggaaaatggtcgtaaacgcatgctcgcttctgccggcgagttgcagaagggcaatgaattagcacttccatcaaagtacgttaacttcctgtatttggccagccattacgagaaactgaaggggtctccagaggacaacgaacagaaacaattatttgtagagcagcacaagcattatcttgatgaaatcattgagcaaatttccgaattcagtaaacgcgtaatcctggccgatgcaaacctcgacaaggtgctgagcgcttacaataagcatcgcgacaaacctatccgtgagcaggctgaaaatatcattcacctgttcacattaacgaacctgggcgctccggccgcttttaaatatttcgacacgacaatcgaccgtaagcgctataccagtacgaaagaagtgttggatgcgacccttattcaccagtcaattacaggattatatgagacccgtatcgaccttagccaattaggtggggatgcggccctgctgggcaagagaaagaggcctagcatcgagcactga

SEQ ID NO: 262 - DNA, 4149 bp, synthetic construct
  source 1..4149: mol_type = other DNA
atggacaaaaagtactctattggcctggatatcgggaccaacagcgtcgggtgggctgttatcaccgacgagtataaagtaccttcgaaaaagttcaaagtgctgggcaacaccgatcgccattcaatcaaaaagaacttgattggtgcgctgttgtttgactccggggaaaccgccgaggcgactcgccttaaacgtacagcacgtcgccggtacactcggcgtaagaatcgcatttgctatttgcaggaaatctttagcaacgagatggcaaaagtcgatgactcgtttttccaccgcctcgaggaaagctttctggtggaggaagacaaaaagcatgagcgtcacccgatcttcggcaacattgtcgatgaagtagcgtatcatgaaaaatacccaaccatttaccacttacgcaaaaagctggtggacagcactgacaaagctgatttgcgccttatctatttagccctggcacatatgattaagtttcgtggtcacttcctgatcgaaggagacttaaatcccgacaacagtgatgttgataaattgtttattcagcttgtccaaacttacaatcaactgttcgaggaaaacccgatcaatgcctccggtgtggatgcaaaagccattttaagtgcacgccttagcaagtcccgtcgcttagaaaaccttatcgcgcagctgcccggcgagaaaaagaatggtttgtttgggaaccttattgccttgagcttaggcctcaccccgaatttcaaaagtaatttcgatcttgcagaagacgccaaattacaactgtcgaaggatacttatgatgacgatctcgataatctgttagcgcagattggtgaccaatacgccgatctttttctggcggctaaaaatctgagcgacgccatcttgctttcggatattctccgcgttaacaccgaaatcacgaaagcgcctcttagtgccagcatgattaaacgttatgatgaacaccaccaggacctgaccttactcaaagcgttggttcgccagcaactgccagagaagtacaaagaaatcttctttgatcagtcaaagaatggttatgccggctatattgacgggggtgcaagccaagaggaattctacaaatttatcaagcctattctggagaaaatggatggcaccgaagagttattggtgaagcttaaccgtgaagacctcctgcggaaacagcgcacattcgataatggttcgatcccacaccaaatccatttgggggagttacacgctattttgcgtcgccaggaagacttttaccctttcctgaaggataaccgggagaaaattgagaagatccttacctttcgtattccgtattacgtaggccccttagcacggggtaatagccgtttcgcgtggatgacacggaagtcggaagagacgatcaccccgtggaacttcgaagaggtagtcgacaagggcgcatcagcgcagtcttttattgaacgtatgacgaatttcgataaaaacttgcccaatgagaaggtgcttccgaaacattccttgttatatgaatattttacagtttacaacgagctgaccaaggttaaatacgtgacggaaggaatgcgcaagcccgcttttcttagcggtgagcaaaaaaaggcgatcgtcgacctgttattcaaaacgaatcgtaaggtgactgtaaagcaactcaaagaagattacttcaaaaagattgagtgcttcgacagcgtcgaaatctctggggtagaggatcggtttaacgcaagtttaggtacctaccatgacctgcttaaaatcattaaggataaagacttcttagataatgaagagaacgaagatattctcgaggacatcgtcttgacgttaaccttatttgaggatcgtgaaatgattgaggaacgcctcaaaacttatgcccacctgttcgacgataaggtgatgaagcagctgaaacgtcggcgctacacaggatggggccgcttgagtcgcaaacttattaacggaatccgtgacaagcaatccggcaaaacgattctggatttcttgaagtcggacggatttgctaatcgcaacttcatgcagttgatccatgatgactccctgacttttaaagaggatattcaaaaggcgcaggttagtggtcaaggcgacagcttacacgaacacatcgcaaatttggctggttcgccggccattaaaaaggggatcctccagaccgtgaaagttgtagatgagcttgttaaggtcatgggtcgtcataagcccgaaaacatcgtgattgaaatggcgcgggagaatcaaacgacccagaaaggacaaaagaatagccgtgaacggatgaagcggatcgaggaaggcattaaagagctggggtctcaaatcttgaaggaacaccctgtggagaacactcagctccaaaatgaaaaactttacctgtactatttgcagaacggacgcgatatgtacgtggaccaagagttggatattaatcggctgagtgactacgacgttgatcatatcgtcccgcagagcttcctcaaagacgattctattgacaataaggtactgacgcgctctgataaaaaccgtggtaagtcggacaacgtgccctccgaagaggttgtgaaaaagatgaaaaattattggcgccagcttttaaacgcgaagctgatcacacaacgtaaattcgataatttgaccaaggctgaacggggtggcctgagcgagttagataaggcaggatttattaaacgccagttagtggagactcgtcaaatcaccaaacatgtcgcgcagattttggacagccggatgaacaccaagtacgatgaaaatgacaaactgatccgtgaggtgaaagtcattactctgaagtccaaattagttagtgatttccggaaggactttcaattctacaaagtccgtgaaattaataactatcatcacgcacatgacgcgtacctgaatgcagtggttgggaccgcccttatcaagaaatatcctaagctggagtcggagtttgtctatggcgactataaggtatacgatgttcgcaaaatgattgcgaaatctgagcaggagatcggtaaggcaaccgcaaaatatttcttttactcaaacattatgaatttctttaagacagaaatcactctggccaacggggagattcgcaaacgtccgttgatcgaaacaaacggcgagactggcgaaattgtttgggacaaagggcgtgatttcgcgacggtgcgcaaggtactgagcatgcctcaagtcaatattgttaagaaaaccgaagtgcagacgggcgggttttccaaggaaagcatcttacccaaacgtaattcagataaacttattgcacgcaaaaaggactgggatccgaaaaagtatggaggcttcgacagtccaaccgtagcctactctgttctcgttgtagcgaaagtagaaaagggtaaatccaagaaactgaaatctgtcaaggagttgcttggaatcaccattatggagcgtagctccttcgagaagaacccgattgactttctggaagccaaaggatataaagaggtcaagaaagatcttatcattaagctgcctaagtattcactcttcgagctggaaaatggtcgtaaacgcatgctcgcttctgccggcgagttgcagaagggcaatgaattagcacttccatcaaagtacgttaacttcctgtatttggccagccattacgagaaactgaaggggtctccagaggacaacgaacagaaacaattatttgtagagcagcacaagcattatcttgatgaaatcattgagcaaatttccgaattcagtaaacgcgtaatcctggccgatgcaaacctcgacaaggtgctgagcgcttacaataagcatcgcgacaaacctatccgtgagcaggctgaaaatatcattcacctgttcacattaacgaacctgggcgctccggccgcttttaaatatttcgacacgacaatcgaccgtaagcgctataccagtacgaaagaagtgttggatgcgacccttattcaccagtcaattacaggattatatgagacccgtatcgaccttagccaattaggtggggatgcggcccctgtgctgggcaagagaaagagaagcctgagcagctga

SEQ ID NO: 263 - DNA, 4149 bp, synthetic construct
  source 1..4149: mol_type = other DNA
atggacaaaaagtactctattggcctggatatcgggaccaacagcgtcgggtgggctgttatcaccgacgagtataaagtaccttcgaaaaagttcaaagtgctgggcaacaccgatcgccattcaatcaaaaagaacttgattggtgcgctgttgtttgactccggggaaaccgccgaggcgactcgccttaaacgtacagcacgtcgccggtacactcggcgtaagaatcgcatttgctatttgcaggaaatctttagcaacgagatggcaaaagtcgatgactcgtttttccaccgcctcgaggaaagctttctggtggaggaagacaaaaagcatgagcgtcacccgatcttcggcaacattgtcgatgaagtagcgtatcatgaaaaatacccaaccatttaccacttacgcaaaaagctggtggacagcactgacaaagctgatttgcgccttatctatttagccctggcacatatgattaagtttcgtggtcacttcctgatcgaaggagacttaaatcccgacaacagtgatgttgataaattgtttattcagcttgtccaaacttacaatcaactgttcgaggaaaacccgatcaatgcctccggtgtggatgcaaaagccattttaagtgcacgccttagcaagtcccgtcgcttagaaaaccttatcgcgcagctgcccggcgagaaaaagaatggtttgtttgggaaccttattgccttgagcttaggcctcaccccgaatttcaaaagtaatttcgatcttgcagaagacgccaaattacaactgtcgaaggatacttatgatgacgatctcgataatctgttagcgcagattggtgaccaatacgccgatctttttctggcggctaaaaatctgagcgacgccatcttgctttcggatattctccgcgttaacaccgaaatcacgaaagcgcctcttagtgccagcatgattaaacgttatgatgaacaccaccaggacctgaccttactcaaagcgttggttcgccagcaactgccagagaagtacaaagaaatcttctttgatcagtcaaagaatggttatgccggctatattgacgggggtgcaagccaagaggaattctacaaatttatcaagcctattctggagaaaatggatggcaccgaagagttattggtgaagcttaaccgtgaagacctcctgcggaaacagcgcacattcgataatggttcgatcccacaccaaatccatttgggggagttacacgctattttgcgtcgccaggaagacttttaccctttcctgaaggataaccgggagaaaattgagaagatccttacctttcgtattccgtattacgtaggccccttagcacggggtaatagccgtttcgcgtggatgacacggaagtcggaagagacgatcaccccgtggaacttcgaagaggtagtcgacaagggcgcatcagcgcagtcttttattgaacgtatgacgaatttcgataaaaacttgcccaatgagaaggtgcttccgaaacattccttgttatatgaatattttacagtttacaacgagctgaccaaggttaaatacgtgacggaaggaatgcgcaagcccgcttttcttagcggtgagcaaaaaaaggcgatcgtcgacctgttattcaaaacgaatcgtaaggtgactgtaaagcaactcaaagaagattacttcaaaaagattgagtgcttcgacagcgtcgaaatctctggggtagaggatcggtttaacgcaagtttaggtacctaccatgacctgcttaaaatcattaaggataaagacttcttagataatgaagagaacgaagatattctcgaggacatcgtcttgacgttaaccttatttgaggatcgtgaaatgattgaggaacgcctcaaaacttatgcccacctgttcgacgataaggtgatgaagcagctgaaacgtcggcgctacacaggatggggccgcttgagtcgcaaacttattaacggaatccgtgacaagcaatccggcaaaacgattctggatttcttgaagtcggacggatttgctaatcgcaacttcatgcagttgatccatgatgactccctgacttttaaagaggatattcaaaaggcgcaggttagtggtcaaggcgacagcttacacgaacacatcgcaaatttggctggttcgccggccattaaaaaggggatcctccagaccgtgaaagttgtagatgagcttgttaaggtcatgggtcgtcataagcccgaaaacatcgtgattgaaatggcgcgggagaatcaaacgacccagaaaggacaaaagaatagccgtgaacggatgaagcggatcgaggaaggcattaaagagctggggtctcaaatcttgaaggaacaccctgtggagaacactcagctccaaaatgaaaaactttacctgtactatttgcagaacggacgcgatatgtacgtggaccaagagttggatattaatcggctgagtgactacgacgttgatcatatcgtcccgcagagcttcctcaaagacgattctattgacaataaggtactgacgcgctctgataaaaaccgtggtaagtcggacaacgtgccctccgaagaggttgtgaaaaagatgaaaaattattggcgccagcttttaaacgcgaagctgatcacacaacgtaaattcgataatttgaccaaggctgaacggggtggcctgagcgagttagataaggcaggatttattaaacgccagttagtggagactcgtcaaatcaccaaacatgtcgcgcagattttggacagccggatgaacaccaagtacgatgaaaatgacaaactgatccgtgaggtgaaagtcattactctgaagtccaaattagttagtgatttccggaaggactttcaattctacaaagtccgtgaaattaataactatcatcacgcacatgacgcgtacctgaatgcagtggttgggaccgcccttatcaagaaatatcctaagctggagtcggagtttgtctatggcgactataaggtatacgatgttcgcaaaatgattgcgaaatctgagcaggagatcggtaaggcaaccgcaaaatatttcttttactcaaacattatgaatttctttaagacagaaatcactctggccaacggggagattcgcaaacgtccgttgatcgaaacaaacggcgagactggcgaaattgtttgggacaaagggcgtgatttcgcgacggtgcgcaaggtactgagcatgcctcaagtcaatattgttaagaaaaccgaagtgcagacgggcgggttttccaaggaaagcatcttacccaaacgtaattcagataaacttattgcacgcaaaaaggactgggatccgaaaaagtatggaggcttcgacagtccaaccgtagcctactctgttctcgttgtagcgaaagtagaaaagggtaaatccaagaaactgaaatctgtcaaggagttgcttggaatcaccattatggagcgtagctccttcgagaagaacccgattgactttctggaagccaaaggatataaagaggtcaagaaagatcttatcattaagctgcctaagtattcactcttcgagctggaaaatggtcgtaaacgcatgctcgcttctgccggcgagttgcagaagggcaatgaattagcacttccatcaaagtacgttaacttcctgtatttggccagccattacgagaaactgaaggggtctccagaggacaacgaacagaaacaattatttgtagagcagcacaagcattatcttgatgaaatcattgagcaaatttccgaattcagtaaacgcgtaatcctggccgatgcaaacctcgacaaggtgctgagcgcttacaataagcatcgcgacaaacctatccgtgagcaggctgaaaatatcattcacctgttcacattaacgaacctgggcgctccggccgcttttaaatatttcgacacgacaatcgaccgtaagcgctataccagtacgaaagaagtgttggatgcgacccttattcaccagtcaattacaggattatatgagacccgtatcgaccttagccaattaggtggggatgcggccatcctgggcaagcgcaagagaagccaccatccttactga

SEQ ID NO: 264 - DNA, 4149 bp, synthetic construct
  source 1..4149: mol_type = other DNA
atggacaaaaagtactctattggcctggatatcgggaccaacagcgtcgggtgggctgttatcaccgacgagtataaagtaccttcgaaaaagttcaaagtgctgggcaacaccgatcgccattcaatcaaaaagaacttgattggtgcgctgttgtttgactccggggaaaccgccgaggcgactcgccttaaacgtacagcacgtcgccggtacactcggcgtaagaatcgcatttgctatttgcaggaaatctttagcaacgagatggcaaaagtcgatgactcgtttttccaccgcctcgaggaaagctttctggtggaggaagacaaaaagcatgagcgtcacccgatcttcggcaacattgtcgatgaagtagcgtatcatgaaaaatacccaaccatttaccacttacgcaaaaagctggtggacagcactgacaaagctgatttgcgccttatctatttagccctggcacatatgattaagtttcgtggtcacttcctgatcgaaggagacttaaatcccgacaacagtgatgttgataaattgtttattcagcttgtccaaacttacaatcaactgttcgaggaaaacccgatcaatgcctccggtgtggatgcaaaagccattttaagtgcacgccttagcaagtcccgtcgcttagaaaaccttatcgcgcagctgcccggcgagaaaaagaatggtttgtttgggaaccttattgccttgagcttaggcctcaccccgaatttcaaaagtaatttcgatcttgcagaagacgccaaattacaactgtcgaaggatacttatgatgacgatctcgataatctgttagcgcagattggtgaccaatacgccgatctttttctggcggctaaaaatctgagcgacgccatcttgctttcggatattctccgcgttaacaccgaaatcacgaaagcgcctcttagtgccagcatgattaaacgttatgatgaacaccaccaggacctgaccttactcaaagcgttggttcgccagcaactgccagagaagtacaaagaaatcttctttgatcagtcaaagaatggttatgccggctatattgacgggggtgcaagccaagaggaattctacaaatttatcaagcctattctggagaaaatggatggcaccgaagagttattggtgaagcttaaccgtgaagacctcctgcggaaacagcgcacattcgataatggttcgatcccacaccaaatccatttgggggagttacacgctattttgcgtcgccaggaagacttttaccctttcctgaaggataaccgggagaaaattgagaagatccttacctttcgtattccgtattacgtaggccccttagcacggggtaatagccgtttcgcgtggatgacacggaagtcggaagagacgatcaccccgtggaacttcgaagaggtagtcgacaagggcgcatcagcgcagtcttttattgaacgtatgacgaatttcgataaaaacttgcccaatgagaaggtgcttccgaaacattccttgttatatgaatattttacagtttacaacgagctgaccaaggttaaatacgtgacggaaggaatgcgcaagcccgcttttcttagcggtgagcaaaaaaaggcgatcgtcgacctgttattcaaaacgaatcgtaaggtgactgtaaagcaactcaaagaagattacttcaaaaagattgagtgcttcgacagcgtcgaaatctctggggtagaggatcggtttaacgcaagtttaggtacctaccatgacctgcttaaaatcattaaggataaagacttcttagataatgaagagaacgaagatattctcgaggacatcgtcttgacgttaaccttatttgaggatcgtgaaatgattgaggaacgcctcaaaacttatgcccacctgttcgacgataaggtgatgaagcagctgaaacgtcggcgctacacaggatggggccgcttgagtcgcaaacttattaacggaatccgtgacaagcaatccggcaaaacgattctggatttcttgaagtcggacggatttgctaatcgcaacttcatgcagttgatccatgatgactccctgacttttaaagaggatattcaaaaggcgcaggttagtggtcaaggcgacagcttacacgaacacatcgcaaatttggctggttcgccggccattaaaaaggggatcctccagaccgtgaaagttgtagatgagcttgttaaggtcatgggtcgtcataagcccgaaaacatcgtgattgaaatggcgcgggagaatcaaacgacccagaaaggacaaaagaatagccgtgaacggatgaagcggatcgaggaaggcattaaagagctggggtctcaaatcttgaaggaacaccctgtggagaacactcagctccaaaatgaaaaactttacctgtactatttgcagaacggacgcgatatgtacgtggaccaagagttggatattaatcggctgagtgactacgacgttgatcatatcgtcccgcagagcttcctcaaagacgattctattgacaataaggtactgacgcgctctgataaaaaccgtggtaagtcggacaacgtgccctccgaagaggttgtgaaaaagatgaaaaattattggcgccagcttttaaacgcgaagctgatcacacaacgtaaattcgataatttgaccaaggctgaacggggtggcctgagcgagttagataaggcaggatttattaaacgccagttagtggagactcgtcaaatcaccaaacatgtcgcgcagattttggacagccggatgaacaccaagtacgatgaaaatgacaaactgatccgtgaggtgaaagtcattactctgaagtccaaattagttagtgatttccggaaggactttcaattctacaaagtccgtgaaattaataactatcatcacgcacatgacgcgtacctgaatgcagtggttgggaccgcccttatcaagaaatatcctaagctggagtcggagtttgtctatggcgactataaggtatacgatgttcgcaaaatgattgcgaaatctgagcaggagatcggtaaggcaaccgcaaaatatttcttttactcaaacattatgaatttctttaagacagaaatcactctggccaacggggagattcgcaaacgtccgttgatcgaaacaaacggcgagactggcgaaattgtttgggacaaagggcgtgatttcgcgacggtgcgcaaggtactgagcatgcctcaagtcaatattgttaagaaaaccgaagtgcagacgggcgggttttccaaggaaagcatcttacccaaacgtaattcagataaacttattgcacgcaaaaaggactgggatccgaaaaagtatggaggcttcgacagtccaaccgtagcctactctgttctcgttgtagcgaaagtagaaaagggtaaatccaagaaactgaaatctgtcaaggagttgcttggaatcaccattatggagcgtagctccttcgagaagaacccgattgactttctggaagccaaaggatataaagaggtcaagaaagatcttatcattaagctgcctaagtattcactcttcgagctggaaaatggtcgtaaacgcatgctcgcttctgccggcgagttgcagaagggcaatgaattagcacttccatcaaagtacgttaacttcctgtatttggccagccattacgagaaactgaaggggtctccagaggacaacgaacagaaacaattatttgtagagcagcacaagcattatcttgatgaaatcattgagcaaatttccgaattcagtaaacgcgtaatcctggccgatgcaaacctcgacaaggtgctgagcgcttacaataagcatcgcgacaaacctatccgtgagcaggctgaaaatatcattcacctgttcacattaacgaacctgggcgctccggccgcttttaaatatttcgacacgacaatcgaccgtaagcgctataccagtacgaaagaagtgttggatgcgacccttattcaccagtcaattacaggattatatgagacccgtatcgaccttagccaattaggtggggatgcggccagcatgctgggcaagagaaagcggtgcatcatcagctga

SEQ ID NO: 265 - DNA, 4149 bp, synthetic construct
  source 1..4149: mol_type = other DNA
atggacaaaaagtactctattggcctggatatcgggaccaacagcgtcgggtgggctgttatcaccgacgagtataaagtaccttcgaaaaagttcaaagtgctgggcaacaccgatcgccattcaatcaaaaagaacttgattggtgcgctgttgtttgactccggggaaaccgccgaggcgactcgccttaaacgtacagcacgtcgccggtacactcggcgtaagaatcgcatttgctatttgcaggaaatctttagcaacgagatggcaaaagtcgatgactcgtttttccaccgcctcgaggaaagctttctggtggaggaagacaaaaagcatgagcgtcacccgatcttcggcaacattgtcgatgaagtagcgtatcatgaaaaatacccaaccatttaccacttacgcaaaaagctggtggacagcactgacaaagctgatttgcgccttatctatttagccctggcacatatgattaagtttcgtggtcacttcctgatcgaaggagacttaaatcccgacaacagtgatgttgataaattgtttattcagcttgtccaaacttacaatcaactgttcgaggaaaacccgatcaatgcctccggtgtggatgcaaaagccattttaagtgcacgccttagcaagtcccgtcgcttagaaaaccttatcgcgcagctgcccggcgagaaaaagaatggtttgtttgggaaccttattgccttgagcttaggcctcaccccgaatttcaaaagtaatttcgatcttgcagaagacgccaaattacaactgtcgaaggatacttatgatgacgatctcgataatctgttagcgcagattggtgaccaatacgccgatctttttctggcggctaaaaatctgagcgacgccatcttgctttcggatattctccgcgttaacaccgaaatcacgaaagcgcctcttagtgccagcatgattaaacgttatgatgaacaccaccaggacctgaccttactcaaagcgttggttcgccagcaactgccagagaagtacaaagaaatcttctttgatcagtcaaagaatggttatgccggctatattgacgggggtgcaagccaagaggaattctacaaatttatcaagcctattctggagaaaatggatggcaccgaagagttattggtgaagcttaaccgtgaagacctcctgcggaaacagcgcacattcgataatggttcgatcccacaccaaatccatttgggggagttacacgctattttgcgtcgccaggaagacttttaccctttcctgaaggataaccgggagaaaattgagaagatccttacctttcgtattccgtattacgtaggccccttagcacggggtaatagccgtttcgcgtggatgacacggaagtcggaagagacgatcaccccgtggaacttcgaagaggtagtcgacaagggcgcatcagcgcagtcttttattgaacgtatgacgaatttcgataaaaacttgcccaatgagaaggtgcttccgaaacattccttgttatatgaatattttacagtttacaacgagctgaccaaggttaaatacgtgacggaaggaatgcgcaagcccgcttttcttagcggtgagcaaaaaaaggcgatcgtcgacctgttattcaaaacgaatcgtaaggtgactgtaaagcaactcaaagaagattacttcaaaaagattgagtgcttcgacagcgtcgaaatctctggggtagaggatcggtttaacgcaagtttaggtacctaccatgacctgcttaaaatcattaaggataaagacttcttagataatgaagagaacgaagatattctcgaggacatcgtcttgacgttaaccttatttgaggatcgtgaaatgattgaggaacgcctcaaaacttatgcccacctgttcgacgataaggtgatgaagcagctgaaacgtcggcgctacacaggatggggccgcttgagtcgcaaacttattaacggaatccgtgacaagcaatccggcaaaacgattctggatttcttgaagtcggacggatttgctaatcgcaacttcatgcagttgatccatgatgactccctgacttttaaagaggatattcaaaaggcgcaggttagtggtcaaggcgacagcttacacgaacacatcgcaaatttggctggttcgccggccattaaaaaggggatcctccagaccgtgaaagttgtagatgagcttgttaaggtcatgggtcgtcataagcccgaaaacatcgtgattgaaatggcgcgggagaatcaaacgacccagaaaggacaaaagaatagccgtgaacggatgaagcggatcgaggaaggcattaaagagctggggtctcaaatcttgaaggaacaccctgtggagaacactcagctccaaaatgaaaaactttacctgtactatttgcagaacggacgcgatatgtacgtggaccaagagttggatattaatcggctgagtgactacgacgttgatcatatcgtcccgcagagcttcctcaaagacgattctattgacaataaggtactgacgcgctctgataaaaaccgtggtaagtcggacaacgtgccctccgaagaggttgtgaaaaagatgaaaaattattggcgccagcttttaaacgcgaagctgatcacacaacgtaaattcgataatttgaccaaggctgaacggggtggcctgagcgagttagataaggcaggatttattaaacgccagttagtggagactcgtcaaatcaccaaacatgtcgcgcagattttggacagccggatgaacaccaagtacgatgaaaatgacaaactgatccgtgaggtgaaagtcattactctgaagtccaaattagttagtgatttccggaaggactttcaattctacaaagtccgtgaaattaataactatcatcacgcacatgacgcgtacctgaatgcagtggttgggaccgcccttatcaagaaatatcctaagctggagtcggagtttgtctatggcgactataaggtatacgatgttcgcaaaatgattgcgaaatctgagcaggagatcggtaaggcaaccgcaaaatatttcttttactcaaacattatgaatttctttaagacagaaatcactctggccaacggggagattcgcaaacgtccgttgatcgaaacaaacggcgagactggcgaaattgtttgggacaaagggcgtgatttcgcgacggtgcgcaaggtactgagcatgcctcaagtcaatattgttaagaaaaccgaagtgcagacgggcgggttttccaaggaaagcatcttacccaaacgtaattcagataaacttattgcacgcaaaaaggactgggatccgaaaaagtatggaggcttcgacagtccaaccgtagcctactctgttctcgttgtagcgaaagtagaaaagggtaaatccaagaaactgaaatctgtcaaggagttgcttggaatcaccattatggagcgtagctccttcgagaagaacccgattgactttctggaagccaaaggatataaagaggtcaagaaagatcttatcattaagctgcctaagtattcactcttcgagctggaaaatggtcgtaaacgcatgctcgcttctgccggcgagttgcagaagggcaatgaattagcacttccatcaaagtacgttaacttcctgtatttggccagccattacgagaaactgaaggggtctccagaggacaacgaacagaaacaattatttgtagagcagcacaagcattatcttgatgaaatcattgagcaaatttccgaattcagtaaacgcgtaatcctggccgatgcaaacctcgacaaggtgctgagcgcttacaataagcatcgcgacaaacctatccgtgagcaggctgaaaatatcattcacctgttcacattaacgaacctgggcgctccggccgcttttaaatatttcgacacgacaatcgaccgtaagcgctataccagtacgaaagaagtgttggatgcgacccttattcaccagtcaattacaggattatatgagacccgtatcgaccttagccaattaggtggggatgcggcctctgtgctgggcaagagaaagagacaccacctggactga

SEQ ID NO: 266 - DNA, 4149 bp, synthetic construct
  source 1..4149: mol_type = other DNA
atggacaaaaagtactctattggcctggatatcgggaccaacagcgtcgggtgggctgttatcaccgacgagtataaagtaccttcgaaaaagttcaaagtgctgggcaacaccgatcgccattcaatcaaaaagaacttgattggtgcgctgttgtttgactccggggaaaccgccgaggcgactcgccttaaacgtacagcacgtcgccggtacactcggcgtaagaatcgcatttgctatttgcaggaaatctttagcaacgagatggcaaaagtcgatgactcgtttttccaccgcctcgaggaaagctttctggtggaggaagacaaaaagcatgagcgtcacccgatcttcggcaacattgtcgatgaagtagcgtatcatgaaaaatacccaaccatttaccacttacgcaaaaagctggtggacagcactgacaaagctgatttgcgccttatctatttagccctggcacatatgattaagtttcgtggtcacttcctgatcgaaggagacttaaatcccgacaacagtgatgttgataaattgtttattcagcttgtccaaacttacaatcaactgttcgaggaaaacccgatcaatgcctccggtgtggatgcaaaagccattttaagtgcacgccttagcaagtcccgtcgcttagaaaaccttatcgcgcagctgcccggcgagaaaaagaatggtttgtttgggaaccttattgccttgagcttaggcctcaccccgaatttcaaaagtaatttcgatcttgcagaagacgccaaattacaactgtcgaaggatacttatgatgacgatctcgataatctgttagcgcagattggtgaccaatacgccgatctttttctggcggctaaaaatctgagcgacgccatcttgctttcggatattctccgcgttaacaccgaaatcacgaaagcgcctcttagtgccagcatgattaaacgttatgatgaacaccaccaggacctgaccttactcaaagcgttggttcgccagcaactgccagagaagtacaaagaaatcttctttgatcagtcaaagaatggttatgccggctatattgacgggggtgcaagccaagaggaattctacaaatttatcaagcctattctggagaaaatggatggcaccgaagagttattggtgaagcttaaccgtgaagacctcctgcggaaacagcgcacattcgataatggttcgatcccacaccaaatccatttgggggagttacacgctattttgcgtcgccaggaagacttttaccctttcctgaaggataaccgggagaaaattgagaagatccttacctttcgtattccgtattacgtaggccccttagcacggggtaatagccgtttcgcgtggatgacacggaagtcggaagagacgatcaccccgtggaacttcgaagaggtagtcgacaagggcgcatcagcgcagtcttttattgaacgtatgacgaatttcgataaaaacttgcccaatgagaaggtgcttccgaaacattccttgttatatgaatattttacagtttacaacgagctgaccaaggttaaatacgtgacggaaggaatgcgcaagcccgcttttcttagcggtgagcaaaaaaaggcgatcgtcgacctgttattcaaaacgaatcgtaaggtgactgtaaagcaactcaaagaagattacttcaaaaagattgagtgcttcgacagcgtcgaaatctctggggtagaggatcggtttaacgcaagtttaggtacctaccatgacctgcttaaaatcattaaggataaagacttcttagataatgaagagaacgaagatattctcgaggacatcgtcttgacgttaaccttatttgaggatcgtgaaatgattgaggaacgcctcaaaacttatgcccacctgttcgacgataaggtgatgaagcagctgaaacgtcggcgctacacaggatggggccgcttgagtcgcaaacttattaacggaatccgtgacaagcaatccggcaaaacgattctggatttcttgaagtcggacggatttgctaatcgcaacttcatgcagttgatccatgatgactccctgacttttaaagaggatattcaaaaggcgcaggttagtggtcaaggcgacagcttacacgaacacatcgcaaatttggctggttcgccggccattaaaaaggggatcctccagaccgtgaaagttgtagatgagcttgttaaggtcatgggtcgtcataagcccgaaaacatcgtgattgaaatggcgcgggagaatcaaacgacccagaaaggacaaaagaatagccgtgaacggatgaagcggatcgaggaaggcattaaagagctggggtctcaaatcttgaaggaacaccctgtggagaacactcagctccaaaatgaaaaactttacctgtactatttgcagaacggacgcgatatgtacgtggaccaagagttggatattaatcggctgagtgactacgacgttgatcatatcgtcccgcagagcttcctcaaagacgattctattgacaataaggtactgacgcgctctgataaaaaccgtggtaagtcggacaacgtgccctccgaagaggttgtgaaaaagatgaaaaattattggcgccagcttttaaacgcgaagctgatcacacaacgtaaattcgataatttgaccaaggctgaacggggtggcctgagcgagttagataaggcaggatttattaaacgccagttagtggagactcgtcaaatcaccaaacatgtcgcgcagattttggacagccggatgaacaccaagtacgatgaaaatgacaaactgatccgtgaggtgaaagtcattactctgaagtccaaattagttagtgatttccggaaggactttcaattctacaaagtccgtgaaattaataactatcatcacgcacatgacgcgtacctgaatgcagtggttgggaccgcccttatcaagaaatatcctaagctggagtcggagtttgtctatggcgactataaggtatacgatgttcgcaaaatgattgcgaaatctgagcaggagatcggtaaggcaaccgcaaaatatttcttttactcaaacattatgaatttctttaagacagaaatcactctggccaacggggagattcgcaaacgtccgttgatcgaaacaaacggcgagactggcgaaattgtttgggacaaagggcgtgatttcgcgacggtgcgcaaggtactgagcatgcctcaagtcaatattgttaagaaaaccgaagtgcagacgggcgggttttccaaggaaagcatcttacccaaacgtaattcagataaacttattgcacgcaaaaaggactgggatccgaaaaagtatggaggcttcgacagtccaaccgtagcctactctgttctcgttgtagcgaaagtagaaaagggtaaatccaagaaactgaaatctgtcaaggagttgcttggaatcaccattatggagcgtagctccttcgagaagaacccgattgactttctggaagccaaaggatataaagaggtcaagaaagatcttatcattaagctgcctaagtattcactcttcgagctggaaaatggtcgtaaacgcatgctcgcttctgccggcgagttgcagaagggcaatgaattagcacttccatcaaagtacgttaacttcctgtatttggccagccattacgagaaactgaaggggtctccagaggacaacgaacagaaacaattatttgtagagcagcacaagcattatcttgatgaaatcattgagcaaatttccgaattcagtaaacgcgtaatcctggccgatgcaaacctcgacaaggtgctgagcgcttacaataagcatcgcgacaaacctatccgtgagcaggctgaaaatatcattcacctgttcacattaacgaacctgggcgctccggccgcttttaaatatttcgacacgacaatcgaccgtaagcgctataccagtacgaaagaagtgttggatgcgacccttattcaccagtcaattacaggattatatgagacccgtatcgaccttagccaattaggtggggatgcggccacagtgcacctgggcaagagaaggctcagaccttggtga

SEQ ID NO: 267 - DNA, 4149 bp, synthetic construct
  source 1..4149: mol_type = other DNA
atggacaaaaagtactctattggcctggatatcgggaccaacagcgtcgggtgggctgttatcaccgacgagtataaagtaccttcgaaaaagttcaaagtgctgggcaacaccgatcgccattcaatcaaaaagaacttgattggtgcgctgttgtttgactccggggaaaccgccgaggcgactcgccttaaacgtacagcacgtcgccggtacactcggcgtaagaatcgcatttgctatttgcaggaaatctttagcaacgagatggcaaaagtcgatgactcgtttttccaccgcctcgaggaaagctttctggtggaggaagacaaaaagcatgagcgtcacccgatcttcggcaacattgtcgatgaagtagcgtatcatgaaaaatacccaaccatttaccacttacgcaaaaagctggtggacagcactgacaaagctgatttgcgccttatctatttagccctggcacatatgattaagtttcgtggtcacttcctgatcgaaggagacttaaatcccgacaacagtgatgttgataaattgtttattcagcttgtccaaacttacaatcaactgttcgaggaaaacccgatcaatgcctccggtgtggatgcaaaagccattttaagtgcacgccttagcaagtcccgtcgcttagaaaaccttatcgcgcagctgcccggcgagaaaaagaatggtttgtttgggaaccttattgccttgagcttaggcctcaccccgaatttcaaaagtaatttcgatcttgcagaagacgccaaattacaactgtcgaaggatacttatgatgacgatctcgataatctgttagcgcagattggtgaccaatacgccgatctttttctggcggctaaaaatctgagcgacgccatcttgctttcggatattctccgcgttaacaccgaaatcacgaaagcgcctcttagtgccagcatgattaaacgttatgatgaacaccaccaggacctgaccttactcaaagcgttggttcgccagcaactgccagagaagtacaaagaaatcttctttgatcagtcaaagaatggttatgccggctatattgacgggggtgcaagccaagaggaattctacaaatttatcaagcctattctggagaaaatggatggcaccgaagagttattggtgaagcttaaccgtgaagacctcctgcggaaacagcgcacattcgataatggttcgatcccacaccaaatccatttgggggagttacacgctattttgcgtcgccaggaagacttttaccctttcctgaaggataaccgggagaaaattgagaagatccttacctttcgtattccgtattacgtaggccccttagcacggggtaatagccgtttcgcgtggatgacacggaagtcggaagagacgatcaccccgtggaacttcgaagaggtagtcgacaagggcgcatcagcgcagtcttttattgaacgtatgacgaatttcgataaaaacttgcccaatgagaaggtgcttccgaaacattccttgttatatgaatattttacagtttacaacgagctgaccaaggttaaatacgtgacggaaggaatgcgcaagcccgcttttcttagcggtgagcaaaaaaaggcgatcgtcgacctgttattcaaaacgaatcgtaaggtgactgtaaagcaactcaaagaagattacttcaaaaagattgagtgcttcgacagcgtcgaaatctctggggtagaggatcggtttaacgcaagtttaggtacctaccatgacctgcttaaaatcattaaggataaagacttcttagataatgaagagaacgaagatattctcgaggacatcgtcttgacgttaaccttatttgaggatcgtgaaatgattgaggaacgcctcaaaacttatgcccacctgttcgacgataaggtgatgaagcagctgaaacgtcggcgctacacaggatggggccgcttgagtcgcaaacttattaacggaatccgtgacaagcaatccggcaaaacgattctggatttcttgaagtcggacggatttgctaatcgcaacttcatgcagttgatccatgatgactccctgacttttaaagaggatattcaaaaggcgcaggttagtggtcaaggcgacagcttacacgaacacatcgcaaatttggctggttcgccggccattaaaaaggggatcctccagaccgtgaaagttgtagatgagcttgttaaggtcatgggtcgtcataagcccgaaaacatcgtgattgaaatggcgcgggagaatcaaacgacccagaaaggacaaaagaatagccgtgaacggatgaagcggatcgaggaaggcattaaagagctggggtctcaaatcttgaaggaacaccctgtggagaacactcagctccaaaatgaaaaactttacctgtactatttgcagaacggacgcgatatgtacgtggaccaagagttggatattaatcggctgagtgactacgacgttgatcatatcgtcccgcagagcttcctcaaagacgattctattgacaataaggtactgacgcgctctgataaaaaccgtggtaagtcggacaacgtgccctccgaagaggttgtgaaaaagatgaaaaattattggcgccagcttttaaacgcgaagctgatcacacaacgtaaattcgataatttgaccaaggctgaacggggtggcctgagcgagttagataaggcaggatttattaaacgccagttagtggagactcgtcaaatcaccaaacatgtcgcgcagattttggacagccggatgaacaccaagtacgatgaaaatgacaaactgatccgtgaggtgaaagtcattactctgaagtccaaattagttagtgatttccggaaggactttcaattctacaaagtccgtgaaattaataactatcatcacgcacatgacgcgtacctgaatgcagtggttgggaccgcccttatcaagaaatatcctaagctggagtcggagtttgtctatggcgactataaggtatacgatgttcgcaaaatgattgcgaaatctgagcaggagatcggtaaggcaaccgcaaaatatttcttttactcaaacattatgaatttctttaagacagaaatcactctggccaacggggagattcgcaaacgtccgttgatcgaaacaaacggcgagactggcgaaattgtttgggacaaagggcgtgatttcgcgacggtgcgcaaggtactgagcatgcctcaagtcaatattgttaagaaaaccgaagtgcagacgggcgggttttccaaggaaagcatcttacccaaacgtaattcagataaacttattgcacgcaaaaaggactgggatccgaaaaagtatggaggcttcgacagtccaaccgtagcctactctgttctcgttgtagcgaaagtagaaaagggtaaatccaagaaactgaaatctgtcaaggagttgcttggaatcaccattatggagcgtagctccttcgagaagaacccgattgactttctggaagccaaaggatataaagaggtcaagaaagatcttatcattaagctgcctaagtattcactcttcgagctggaaaatggtcgtaaacgcatgctcgcttctgccggcgagttgcagaagggcaatgaattagcacttccatcaaagtacgttaacttcctgtatttggccagccattacgagaaactgaaggggtctccagaggacaacgaacagaaacaattatttgtagagcagcacaagcattatcttgatgaaatcattgagcaaatttccgaattcagtaaacgcgtaatcctggccgatgcaaacctcgacaaggtgctgagcgcttacaataagcatcgcgacaaacctatccgtgagcaggctgaaaatatcattcacctgttcacattaacgaacctgggcgctccggccgcttttaaatatttcgacacgacaatcgaccgtaagcgctataccagtacgaaagaagtgttggatgcgacccttattcaccagtcaattacaggattatatgagacccgtatcgaccttagccaattaggtggggatgcggcctctgtgctgggcaagagaaagcggcaccctaaggtttga

SEQ ID NO: 268 - DNA, 4149 bp, synthetic construct
  source 1..4149: mol_type = other DNA
atggacaaaaagtactctattggcctggatatcgggaccaacagcgtcgggtgggctgttatcaccgacgagtataaagtaccttcgaaaaagttcaaagtgctgggcaacaccgatcgccattcaatcaaaaagaacttgattggtgcgctgttgtttgactccggggaaaccgccgaggcgactcgccttaaacgtacagcacgtcgccggtacactcggcgtaagaatcgcatttgctatttgcaggaaatctttagcaacgagatggcaaaagtcgatgactcgtttttccaccgcctcgaggaaagctttctggtggaggaagacaaaaagcatgagcgtcacccgatcttcggcaacattgtcgatgaagtagcgtatcatgaaaaatacccaaccatttaccacttacgcaaaaagctggtggacagcactgacaaagctgatttgcgccttatctatttagccctggcacatatgattaagtttcgtggtcacttcctgatcgaaggagacttaaatcccgacaacagtgatgttgataaattgtttattcagcttgtccaaacttacaatcaactgttcgaggaaaacccgatcaatgcctccggtgtggatgcaaaagccattttaagtgcacgccttagcaagtcccgtcgcttagaaaaccttatcgcgcagctgcccggcgagaaaaagaatggtttgtttgggaaccttattgccttgagcttaggcctcaccccgaatttcaaaagtaatttcgatcttgcagaagacgccaaattacaactgtcgaaggatacttatgatgacgatctcgataatctgttagcgcagattggtgaccaatacgccgatctttttctggcggctaaaaatctgagcgacgccatcttgctttcggatattctccgcgttaacaccgaaatcacgaaagcgcctcttagtgccagcatgattaaacgttatgatgaacaccaccaggacctgaccttactcaaagcgttggttcgccagcaactgccagagaagtacaaagaaatcttctttgatcagtcaaagaatggttatgccggctatattgacgggggtgcaagccaagaggaattctacaaatttatcaagcctattctggagaaaatggatggcaccgaagagttattggtgaagcttaaccgtgaagacctcctgcggaaacagcgcacattcgataatggttcgatcccacaccaaatccatttgggggagttacacgctattttgcgtcgccaggaagacttttaccctttcctgaaggataaccgggagaaaattgagaagatccttacctttcgtattccgtattacgtaggccccttagcacggggtaatagccgtttcgcgtggatgacacggaagtcggaagagacgatcaccccgtggaacttcgaagaggtagtcgacaagggcgcatcagcgcagtcttttattgaacgtatgacgaatttcgataaaaacttgcccaatgagaaggtgcttccgaaacattccttgttatatgaatattttacagtttacaacgagctgaccaaggttaaatacgtgacggaaggaatgcgcaagcccgcttttcttagcggtgagcaaaaaaaggcgatcgtcgacctgttattcaaaacgaatcgtaaggtgactgtaaagcaactcaaagaagattacttcaaaaagattgagtgcttcgacagcgtcgaaatctctggggtagaggatcggtttaacgcaagtttaggtacctaccatgacctgcttaaaatcattaaggataaagacttcttagataatgaagagaacgaagatattctcgaggacatcgtcttgacgttaaccttatttgaggatcgtgaaatgattgaggaacgcctcaaaacttatgcccacctgttcgacgataaggtgatgaagcagctgaaacgtcggcgctacacaggatggggccgcttgagtcgcaaacttattaacggaatccgtgacaagcaatccggcaaaacgattctggatttcttgaagtcggacggatttgctaatcgcaacttcatgcagttgatccatgatgactccctgacttttaaagaggatattcaaaaggcgcaggttagtggtcaaggcgacagcttacacgaacacatcgcaaatttggctggttcgccggccattaaaaaggggatcctccagaccgtgaaagttgtagatgagcttgttaaggtcatgggtcgtcataagcccgaaaacatcgtgattgaaatggcgcgggagaatcaaacgacccagaaaggacaaaagaatagccgtgaacggatgaagcggatcgaggaaggcattaaagagctggggtctcaaatcttgaaggaacaccctgtggagaacactcagctccaaaatgaaaaactttacctgtactatttgcagaacggacgcgatatgtacgtggaccaagagttggatattaatcggctgagtgactacgacgttgatcatatcgtcccgcagagcttcctcaaagacgattctattgacaataaggtactgacgcgctctgataaaaaccgtggtaagtcggacaacgtgccctccgaagaggttgtgaaaaagatgaaaaattattggcgccagcttttaaacgcgaagctgatcacacaacgtaaattcgataatttgaccaaggctgaacggggtggcctgagcgagttagataaggcaggatttattaaacgccagttagtggagactcgtcaaatcaccaaacatgtcgcgcagattttggacagccggatgaacaccaagtacgatgaaaatgacaaactgatccgtgaggtgaaagtcattactctgaagtccaaattagttagtgatttccggaaggactttcaattctacaaagtccgtgaaattaataactatcatcacgcacatgacgcgtacctgaatgcagtggttgggaccgcccttatcaagaaatatcctaagctggagtcggagtttgtctatggcgactataaggtatacgatgttcgcaaaatgattgcgaaatctgagcaggagatcggtaaggcaaccgcaaaatatttcttttactcaaacattatgaatttctttaagacagaaatcactctggccaacggggagattcgcaaacgtccgttgatcgaaacaaacggcgagactggcgaaattgtttgggacaaagggcgtgatttcgcgacggtgcgcaaggtactgagcatgcctcaagtcaatattgttaagaaaaccgaagtgcagacgggcgggttttccaaggaaagcatcttacccaaacgtaattcagataaacttattgcacgcaaaaaggactgggatccgaaaaagtatggaggcttcgacagtccaaccgtagcctactctgttctcgttgtagcgaaagtagaaaagggtaaatccaagaaactgaaatctgtcaaggagttgcttggaatcaccattatggagcgtagctccttcgagaagaacccgattgactttctggaagccaaaggatataaagaggtcaagaaagatcttatcattaagctgcctaagtattcactcttcgagctggaaaatggtcgtaaacgcatgctcgcttctgccggcgagttgcagaagggcaatgaattagcacttccatcaaagtacgttaacttcctgtatttggccagccattacgagaaactgaaggggtctccagaggacaacgaacagaaacaattatttgtagagcagcacaagcattatcttgatgaaatcattgagcaaatttccgaattcagtaaacgcgtaatcctggccgatgcaaacctcgacaaggtgctgagcgcttacaataagcatcgcgacaaacctatccgtgagcaggctgaaaatatcattcacctgttcacattaacgaacctgggcgctccggccgcttttaaatatttcgacacgacaatcgaccgtaagcgctataccagtacgaaagaagtgttggatgcgacccttattcaccagtcaattacaggattatatgagacccgtatcgaccttagccaattaggtggggatgcggccagcatcctgggcaagagaaagaacagggaccccagctga

SEQ ID NO: 269 - DNA, 4149 bp, synthetic construct
  source 1..4149: mol_type = other DNA
atggacaaaaagtactctattggcctggatatcgggaccaacagcgtcgggtgggctgttatcaccgacgagtataaagtaccttcgaaaaagttcaaagtgctgggcaacaccgatcgccattcaatcaaaaagaacttgattggtgcgctgttgtttgactccggggaaaccgccgaggcgactcgccttaaacgtacagcacgtcgccggtacactcggcgtaagaatcgcatttgctatttgcaggaaatctttagcaacgagatggcaaaagtcgatgactcgtttttccaccgcctcgaggaaagctttctggtggaggaagacaaaaagcatgagcgtcacccgatcttcggcaacattgtcgatgaagtagcgtatcatgaaaaatacccaaccatttaccacttacgcaaaaagctggtggacagcactgacaaagctgatttgcgccttatctatttagccctggcacatatgattaagtttcgtggtcacttcctgatcgaaggagacttaaatcccgacaacagtgatgttgataaattgtttattcagcttgtccaaacttacaatcaactgttcgaggaaaacccgatcaatgcctccggtgtggatgcaaaagccattttaagtgcacgccttagcaagtcccgtcgcttagaaaaccttatcgcgcagctgcccggcgagaaaaagaatggtttgtttgggaaccttattgccttgagcttaggcctcaccccgaatttcaaaagtaatttcgatcttgcagaagacgccaaattacaactgtcgaaggatacttatgatgacgatctcgataatctgttagcgcagattggtgaccaatacgccgatctttttctggcggctaaaaatctgagcgacgccatcttgctttcggatattctccgcgttaacaccgaaatcacgaaagcgcctcttagtgccagcatgattaaacgttatgatgaacaccaccaggacctgaccttactcaaagcgttggttcgccagcaactgccagagaagtacaaagaaatcttctttgatcagtcaaagaatggttatgccggctatattgacgggggtgcaagccaagaggaattctacaaatttatcaagcctattctggagaaaatggatggcaccgaagagttattggtgaagcttaaccgtgaagacctcctgcggaaacagcgcacattcgataatggttcgatcccacaccaaatccatttgggggagttacacgctattttgcgtcgccaggaagacttttaccctttcctgaaggataaccgggagaaaattgagaagatccttacctttcgtattccgtattacgtaggccccttagcacggggtaatagccgtttcgcgtggatgacacggaagtcggaagagacgatcaccccgtggaacttcgaagaggtagtcgacaagggcgcatcagcgcagtcttttattgaacgtatgacgaatttcgataaaaacttgcccaatgagaaggtgcttccgaaacattccttgttatatgaatattttacagtttacaacgagctgaccaaggttaaatacgtgacggaaggaatgcgcaagcccgcttttcttagcggtgagcaaaaaaaggcgatcgtcgacctgttattcaaaacgaatcgtaaggtgactgtaaagcaactcaaagaagattacttcaaaaagattgagtgcttcgacagcgtcgaaatctctggggtagaggatcggtttaacgcaagtttaggtacctaccatgacctgcttaaaatcattaaggataaagacttcttagataatgaagagaacgaagatattctcgaggacatcgtcttgacgttaaccttatttgaggatcgtgaaatgattgaggaacgcctcaaaacttatgcccacctgttcgacgataaggtgatgaagcagctgaaacgtcggcgctacacaggatggggccgcttgagtcgcaaacttattaacggaatccgtgacaagcaatccggcaaaacgattctggatttcttgaagtcggacggatttgctaatcgcaacttcatgcagttgatccatgatgactccctgacttttaaagaggatattcaaaaggcgcaggttagtggtcaaggcgacagcttacacgaacacatcgcaaatttggctggttcgccggccattaaaaaggggatcctccagaccgtgaaagttgtagatgagcttgttaaggtcatgggtcgtcataagcccgaaaacatcgtgattgaaatggcgcgggagaatcaaacgacccagaaaggacaaaagaatagccgtgaacggatgaagcggatcgaggaaggcattaaagagctggggtctcaaatcttgaaggaacaccctgtggagaacactcagctccaaaatgaaaaactttacctgtactatttgcagaacggacgcgatatgtacgtggaccaagagttggatattaatcggctgagtgactacgacgttgatcatatcgtcccgcagagcttcctcaaagacgattctattgacaataaggtactgacgcgctctgataaaaaccgtggtaagtcggacaacgtgccctccgaagaggttgtgaaaaagatgaaaaattattggcgccagcttttaaacgcgaagctgatcacacaacgtaaattcgataatttgaccaaggctgaacggggtggcctgagcgagttagataaggcaggatttattaaacgccagttagtggagactcgtcaaatcaccaaacatgtcgcgcagattttggacagccggatgaacaccaagtacgatgaaaatgacaaactgatccgtgaggtgaaagtcattactctgaagtccaaattagttagtgatttccggaaggactttcaattctacaaagtccgtgaaattaataactatcatcacgcacatgacgcgtacctgaatgcagtggttgggaccgcccttatcaagaaatatcctaagctggagtcggagtttgtctatggcgactataaggtatacgatgttcgcaaaatgattgcgaaatctgagcaggagatcggtaaggcaaccgcaaaatatttcttttactcaaacattatgaatttctttaagacagaaatcactctggccaacggggagattcgcaaacgtccgttgatcgaaacaaacggcgagactggcgaaattgtttgggacaaagggcgtgatttcgcgacggtgcgcaaggtactgagcatgcctcaagtcaatattgttaagaaaaccgaagtgcagacgggcgggttttccaaggaaagcatcttacccaaacgtaattcagataaacttattgcacgcaaaaaggactgggatccgaaaaagtatggaggcttcgacagtccaaccgtagcctactctgttctcgttgtagcgaaagtagaaaagggtaaatccaagaaactgaaatctgtcaaggagttgcttggaatcaccattatggagcgtagctccttcgagaagaacccgattgactttctggaagccaaaggatataaagaggtcaagaaagatcttatcattaagctgcctaagtattcactcttcgagctggaaaatggtcgtaaacgcatgctcgcttctgccggcgagttgcagaagggcaatgaattagcacttccatcaaagtacgttaacttcctgtatttggccagccattacgagaaactgaaggggtctccagaggacaacgaacagaaacaattatttgtagagcagcacaagcattatcttgatgaaatcattgagcaaatttccgaattcagtaaacgcgtaatcctggccgatgcaaacctcgacaaggtgctgagcgcttacaataagcatcgcgacaaacctatccgtgagcaggctgaaaatatcattcacctgttcacattaacgaacctgggcgctccggccgcttttaaatatttcgacacgacaatcgaccgtaagcgctataccagtacgaaagaagtgttggatgcgacccttattcaccagtcaattacaggattatatgagacccgtatcgaccttagccaattaggtggggatgcggccagagtgctgggcaagagaaagaccggcagaagcccttga

SEQ ID NO: 270 - DNA, 4146 bp, synthetic construct
  source 1..4146: mol_type = other DNA
atggacaaaaagtactctattggcctggatatcgggaccaacagcgtcgggtgggctgttatcaccgacgagtataaagtaccttcgaaaaagttcaaagtgctgggcaacaccgatcgccattcaatcaaaaagaacttgattggtgcgctgttgtttgactccggggaaaccgccgaggcgactcgccttaaacgtacagcacgtcgccggtacactcggcgtaagaatcgcatttgctatttgcaggaaatctttagcaacgagatggcaaaagtcgatgactcgtttttccaccgcctcgaggaaagctttctggtggaggaagacaaaaagcatgagcgtcacccgatcttcggcaacattgtcgatgaagtagcgtatcatgaaaaatacccaaccatttaccacttacgcaaaaagctggtggacagcactgacaaagctgatttgcgccttatctatttagccctggcacatatgattaagtttcgtggtcacttcctgatcgaaggagacttaaatcccgacaacagtgatgttgataaattgtttattcagcttgtccaaacttacaatcaactgttcgaggaaaacccgatcaatgcctccggtgtggatgcaaaagccattttaagtgcacgccttagcaagtcccgtcgcttagaaaaccttatcgcgcagctgcccggcgagaaaaagaatggtttgtttgggaaccttattgccttgagcttaggcctcaccccgaatttcaaaagtaatttcgatcttgcagaagacgccaaattacaactgtcgaaggatacttatgatgacgatctcgataatctgttagcgcagattggtgaccaatacgccgatctttttctggcggctaaaaatctgagcgacgccatcttgctttcggatattctccgcgttaacaccgaaatcacgaaagcgcctcttagtgccagcatgattaaacgttatgatgaacaccaccaggacctgaccttactcaaagcgttggttcgccagcaactgccagagaagtacaaagaaatcttctttgatcagtcaaagaatggttatgccggctatattgacgggggtgcaagccaagaggaattctacaaatttatcaagcctattctggagaaaatggatggcaccgaagagttattggtgaagcttaaccgtgaagacctcctgcggaaacagcgcacattcgataatggttcgatcccacaccaaatccatttgggggagttacacgctattttgcgtcgccaggaagacttttaccctttcctgaaggataaccgggagaaaattgagaagatccttacctttcgtattccgtattacgtaggccccttagcacggggtaatagccgtttcgcgtggatgacacggaagtcggaagagacgatcaccccgtggaacttcgaagaggtagtcgacaagggcgcatcagcgcagtcttttattgaacgtatgacgaatttcgataaaaacttgcccaatgagaaggtgcttccgaaacattccttgttatatgaatattttacagtttacaacgagctgaccaaggttaaatacgtgacggaaggaatgcgcaagcccgcttttcttagcggtgagcaaaaaaaggcgatcgtcgacctgttattcaaaacgaatcgtaaggtgactgtaaagcaactcaaagaagattacttcaaaaagattgagtgcttcgacagcgtcgaaatctctggggtagaggatcggtttaacgcaagtttaggtacctaccatgacctgcttaaaatcattaaggataaagacttcttagataatgaagagaacgaagatattctcgaggacatcgtcttgacgttaaccttatttgaggatcgtgaaatgattgaggaacgcctcaaaacttatgcccacctgttcgacgataaggtgatgaagcagctgaaacgtcggcgctacacaggatggggccgcttgagtcgcaaacttattaacggaatccgtgacaagcaatccggcaaaacgattctggatttcttgaagtcggacggatttgctaatcgcaacttcatgcagttgatccatgatgactccctgacttttaaagaggatattcaaaaggcgcaggttagtggtcaaggcgacagcttacacgaacacatcgcaaatttggctggttcgccggccattaaaaaggggatcctccagaccgtgaaagttgtagatgagcttgttaaggtcatgggtcgtcataagcccgaaaacatcgtgattgaaatggcgcgggagaatcaaacgacccagaaaggacaaaagaatagccgtgaacggatgaagcggatcgaggaaggcattaaagagctggggtctcaaatcttgaaggaacaccctgtggagaacactcagctccaaaatgaaaaactttacctgtactatttgcagaacggacgcgatatgtacgtggaccaagagttggatattaatcggctgagtgactacgacgttgatcatatcgtcccgcagagcttcctcaaagacgattctattgacaataaggtactgacgcgctctgataaaaaccgtggtaagtcggacaacgtgccctccgaagaggttgtgaaaaagatgaaaaattattggcgccagcttttaaacgcgaagctgatcacacaacgtaaattcgataatttgaccaaggctgaacggggtggcctgagcgagttagataaggcaggatttattaaacgccagttagtggagactcgtcaaatcaccaaacatgtcgcgcagattttggacagccggatgaacaccaagtacgatgaaaatgacaaactgatccgtgaggtgaaagtcattactctgaagtccaaattagttagtgatttccggaaggactttcaattctacaaagtccgtgaaattaataactatcatcacgcacatgacgcgtacctgaatgcagtggttgggaccgcccttatcaagaaatatcctaagctggagtcggagtttgtctatggcgactataaggtatacgatgttcgcaaaatgattgcgaaatctgagcaggagatcggtaaggcaaccgcaaaatatttcttttactcaaacattatgaatttctttaagacagaaatcactctggccaacggggagattcgcaaacgtccgttgatcgaaacaaacggcgagactggcgaaattgtttgggacaaagggcgtgatttcgcgacggtgcgcaaggtactgagcatgcctcaagtcaatattgttaagaaaaccgaagtgcagacgggcgggttttccaaggaaagcatcttacccaaacgtaattcagataaacttattgcacgcaaaaaggactgggatccgaaaaagtatggaggcttcgacagtccaaccgtagcctactctgttctcgttgtagcgaaagtagaaaagggtaaatccaagaaactgaaatctgtcaaggagttgcttggaatcaccattatggagcgtagctccttcgagaagaacccgattgactttctggaagccaaaggatataaagaggtcaagaaagatcttatcattaagctgcctaagtattcactcttcgagctggaaaatggtcgtaaacgcatgctcgcttctgccggcgagttgcagaagggcaatgaattagcacttccatcaaagtacgttaacttcctgtatttggccagccattacgagaaactgaaggggtctccagaggacaacgaacagaaacaattatttgtagagcagcacaagcattatcttgatgaaatcattgagcaaatttccgaattcagtaaacgcgtaatcctggccgatgcaaacctcgacaaggtgctgagcgcttacaataagcatcgcgacaaacctatccgtgagcaggctgaaaatatcattcacctgttcacattaacgaacctgggcgctccggccgcttttaaatatttcgacacgacaatcgaccgtaagcgctataccagtacgaaagaagtgttggatgcgacccttattcaccagtcaattacaggattatatgagacccgtatcgaccttagccaattaggtggggatgcggccgtgctgggcaagagaaagagagatgactgctggtga

SEQ ID NO: 271 - DNA, 4149 bp, synthetic construct
  source 1..4149: mol_type = other DNA
atggacaaaaagtactctattggcctggatatcgggaccaacagcgtcgggtgggctgttatcaccgacgagtataaagtaccttcgaaaaagttcaaagtgctgggcaacaccgatcgccattcaatcaaaaagaacttgattggtgcgctgttgtttgactccggggaaaccgccgaggcgactcgccttaaacgtacagcacgtcgccggtacactcggcgtaagaatcgcatttgctatttgcaggaaatctttagcaacgagatggcaaaagtcgatgactcgtttttccaccgcctcgaggaaagctttctggtggaggaagacaaaaagcatgagcgtcacccgatcttcggcaacattgtcgatgaagtagcgtatcatgaaaaatacccaaccatttaccacttacgcaaaaagctggtggacagcactgacaaagctgatttgcgccttatctatttagccctggcacatatgattaagtttcgtggtcacttcctgatcgaaggagacttaaatcccgacaacagtgatgttgataaattgtttattcagcttgtccaaacttacaatcaactgttcgaggaaaacccgatcaatgcctccggtgtggatgcaaaagccattttaagtgcacgccttagcaagtcccgtcgcttagaaaaccttatcgcgcagctgcccggcgagaaaaagaatggtttgtttgggaaccttattgccttgagcttaggcctcaccccgaatttcaaaagtaatttcgatcttgcagaagacgccaaattacaactgtcgaaggatacttatgatgacgatctcgataatctgttagcgcagattggtgaccaatacgccgatctttttctggcggctaaaaatctgagcgacgccatcttgctttcggatattctccgcgttaacaccgaaatcacgaaagcgcctcttagtgccagcatgattaaacgttatgatgaacaccaccaggacctgaccttactcaaagcgttggttcgccagcaactgccagagaagtacaaagaaatcttctttgatcagtcaaagaatggttatgccggctatattgacgggggtgcaagccaagaggaattctacaaatttatcaagcctattctggagaaaatggatggcaccgaagagttattggtgaagcttaaccgtgaagacctcctgcggaaacagcgcacattcgataatggttcgatcccacaccaaatccatttgggggagttacacgctattttgcgtcgccaggaagacttttaccctttcctgaaggataaccgggagaaaattgagaagatccttacctttcgtattccgtattacgtaggccccttagcacggggtaatagccgtttcgcgtggatgacacggaagtcggaagagacgatcaccccgtggaacttcgaagaggtagtcgacaagggcgcatcagcgcagtcttttattgaacgtatgacgaatttcgataaaaacttgcccaatgagaaggtgcttccgaaacattccttgttatatgaatattttacagtttacaacgagctgaccaaggttaaatacgtgacggaaggaatgcgcaagcccgcttttcttagcggtgagcaaaaaaaggcgatcgtcgacctgttattcaaaacgaatcgtaaggtgactgtaaagcaactcaaagaagattacttcaaaaagattgagtgcttcgacagcgtcgaaatctctggggtagaggatcggtttaacgcaagtttaggtacctaccatgacctgcttaaaatcattaaggataaagacttcttagataatgaagagaacgaagatattctcgaggacatcgtcttgacgttaaccttatttgaggatcgtgaaatgattgaggaacgcctcaaaacttatgcccacctgttcgacgataaggtgatgaagcagctgaaacgtcggcgctacacaggatggggccgcttgagtcgcaaacttattaacggaatccgtgacaagcaatccggcaaaacgattctggatttcttgaagtcggacggatttgctaatcgcaacttcatgcagttgatccatgatgactccctgacttttaaagaggatattcaaaaggcgcaggttagtggtcaaggcgacagcttacacgaacacatcgcaaatttggctggttcgccggccattaaaaaggggatcctccagaccgtgaaagttgtagatgagcttgttaaggtcatgggtcgtcataagcccgaaaacatcgtgattgaaatggcgcgggagaatcaaacgacccagaaaggacaaaagaatagccgtgaacggatgaagcggatcgaggaaggcattaaagagctggggtctcaaatcttgaaggaacaccctgtggagaacactcagctccaaaatgaaaaactttacctgtactatttgcagaacggacgcgatatgtacgtggaccaagagttggatattaatcggctgagtgactacgacgttgatcatatcgtcccgcagagcttcctcaaagacgattctattgacaataaggtactgacgcgctctgataaaaaccgtggtaagtcggacaacgtgccctccgaagaggttgtgaaaaagatgaaaaattattggcgccagcttttaaacgcgaagctgatcacacaacgtaaattcgataatttgaccaaggctgaacggggtggcctgagcgagttagataaggcaggatttattaaacgccagttagtggagactcgtcaaatcaccaaacatgtcgcgcagattttggacagccggatgaacaccaagtacgatgaaaatgacaaactgatccgtgaggtgaaagtcattactctgaagtccaaattagttagtgatttccggaaggactttcaattctacaaagtccgtgaaattaataactatcatcacgcacatgacgcgtacctgaatgcagtggttgggaccgcccttatcaagaaatatcctaagctggagtcggagtttgtctatggcgactataaggtatacgatgttcgcaaaatgattgcgaaatctgagcaggagatcggtaaggcaaccgcaaaatatttcttttactcaaacattatgaatttctttaagacagaaatcactctggccaacggggagattcgcaaacgtccgttgatcgaaacaaacggcgagactggcgaaattgtttgggacaaagggcgtgatttcgcgacggtgcgcaaggtactgagcatgcctcaagtcaatattgttaagaaaaccgaagtgcagacgggcgggttttccaaggaaagcatcttacccaaacgtaattcagataaacttattgcacgcaaaaaggactgggatccgaaaaagtatggaggcttcgacagtccaaccgtagcctactctgttctcgttgtagcgaaagtagaaaagggtaaatccaagaaactgaaatctgtcaaggagttgcttggaatcaccattatggagcgtagctccttcgagaagaacccgattgactttctggaagccaaaggatataaagaggtcaagaaagatcttatcattaagctgcctaagtattcactcttcgagctggaaaatggtcgtaaacgcatgctcgcttctgccggcgagttgcagaagggcaatgaattagcacttccatcaaagtacgttaacttcctgtatttggccagccattacgagaaactgaaggggtctccagaggacaacgaacagaaacaattatttgtagagcagcacaagcattatcttgatgaaatcattgagcaaatttccgaattcagtaaacgcgtaatcctggccgatgcaaacctcgacaaggtgctgagcgcttacaataagcatcgcgacaaacctatccgtgagcaggctgaaaatatcattcacctgttcacattaacgaacctgggcgctccggccgcttttaaatatttcgacacgacaatcgaccgtaagcgctataccagtacgaaagaagtgttggatgcgacccttattcaccagtcaattacaggattatatgagacccgtatcgaccttagccaattaggtggggatgcggccaagagaaagtgcgccgtgttcctggaaggccagaactga

SEQ ID NO: 272 - DNA, 4146 bp, synthetic construct
  source 1..4146: mol_type = other DNA
atggacaaaaagtactctattggcctggatatcgggaccaacagcgtcgggtgggctgttatcaccgacgagtataaagtaccttcgaaaaagttcaaagtgctgggcaacaccgatcgccattcaatcaaaaagaacttgattggtgcgctgttgtttgactccggggaaaccgccgaggcgactcgccttaaacgtacagcacgtcgccggtacactcggcgtaagaatcgcatttgctatttgcaggaaatctttagcaacgagatggcaaaagtcgatgactcgtttttccaccgcctcgaggaaagctttctggtggaggaagacaaaaagcatgagcgtcacccgatcttcggcaacattgtcgatgaagtagcgtatcatgaaaaatacccaaccatttaccacttacgcaaaaagctggtggacagcactgacaaagctgatttgcgccttatctatttagccctggcacatatgattaagtttcgtggtcacttcctgatcgaaggagacttaaatcccgacaacagtgatgttgataaattgtttattcagcttgtccaaacttacaatcaactgttcgaggaaaacccgatcaatgcctccggtgtggatgcaaaagccattttaagtgcacgccttagcaagtcccgtcgcttagaaaaccttatcgcgcagctgcccggcgagaaaaagaatggtttgtttgggaaccttattgccttgagcttaggcctcaccccgaatttcaaaagtaatttcgatcttgcagaagacgccaaattacaactgtcgaaggatacttatgatgacgatctcgataatctgttagcgcagattggtgaccaatacgccgatctttttctggcggctaaaaatctgagcgacgccatcttgctttcggatattctccgcgttaacaccgaaatcacgaaagcgcctcttagtgccagcatgattaaacgttatgatgaacaccaccaggacctgaccttactcaaagcgttggttcgccagcaactgccagagaagtacaaagaaatcttctttgatcagtcaaagaatggttatgccggctatattgacgggggtgcaagccaagaggaattctacaaatttatcaagcctattctggagaaaatggatggcaccgaagagttattggtgaagcttaaccgtgaagacctcctgcggaaacagcgcacattcgataatggttcgatcccacaccaaatccatttgggggagttacacgctattttgcgtcgccaggaagacttttaccctttcctgaaggataaccgggagaaaattgagaagatccttacctttcgtattccgtattacgtaggccccttagcacggggtaatagccgtttcgcgtggatgacacggaagtcggaagagacgatcaccccgtggaacttcgaagaggtagtcgacaagggcgcatcagcgcagtcttttattgaacgtatgacgaatttcgataaaaacttgcccaatgagaaggtgcttccgaaacattccttgttatatgaatattttacagtttacaacgagctgaccaaggttaaatacgtgacggaaggaatgcgcaagcccgcttttcttagcggtgagcaaaaaaaggcgatcgtcgacctgttattcaaaacgaatcgtaaggtgactgtaaagcaactcaaagaagattacttcaaaaagattgagtgcttcgacagcgtcgaaatctctggggtagaggatcggtttaacgcaagtttaggtacctaccatgacctgcttaaaatcattaaggataaagacttcttagataatgaagagaacgaagatattctcgaggacatcgtcttgacgttaaccttatttgaggatcgtgaaatgattgaggaacgcctcaaaacttatgcccacctgttcgacgataaggtgatgaagcagctgaaacgtcggcgctacacaggatggggccgcttgagtcgcaaacttattaacggaatccgtgacaagcaatccggcaaaacgattctggatttcttgaagtcggacggatttgctaatcgcaacttcatgcagttgatccatgatgactccctgacttttaaagaggatattcaaaaggcgcaggttagtggtcaaggcgacagcttacacgaacacatcgcaaatttggctggttcgccggccattaaaaaggggatcctccagaccgtgaaagttgtagatgagcttgttaaggtcatgggtcgtcataagcccgaaaacatcgtgattgaaatggcgcgggagaatcaaacgacccagaaaggacaaaagaatagccgtgaacggatgaagcggatcgaggaaggcattaaagagctggggtctcaaatcttgaaggaacaccctgtggagaacactcagctccaaaatgaaaaactttacctgtactatttgcagaacggacgcgatatgtacgtggaccaagagttggatattaatcggctgagtgactacgacgttgatcatatcgtcccgcagagcttcctcaaagacgattctattgacaataaggtactgacgcgctctgataaaaaccgtggtaagtcggacaacgtgccctccgaagaggttgtgaaaaagatgaaaaattattggcgccagcttttaaacgcgaagctgatcacacaacgtaaattcgataatttgaccaaggctgaacggggtggcctgagcgagttagataaggcaggatttattaaacgccagttagtggagactcgtcaaatcaccaaacatgtcgcgcagattttggacagccggatgaacaccaagtacgatgaaaatgacaaactgatccgtgaggtgaaagtcattactctgaagtccaaattagttagtgatttccggaaggactttcaattctacaaagtccgtgaaattaataactatcatcacgcacatgacgcgtacctgaatgcagtggttgggaccgcccttatcaagaaatatcctaagctggagtcggagtttgtctatggcgactataaggtatacgatgttcgcaaaatgattgcgaaatctgagcaggagatcggtaaggcaaccgcaaaatatttcttttactcaaacattatgaatttctttaagacagaaatcactctggccaacggggagattcgcaaacgtccgttgatcgaaacaaacggcgagactggcgaaattgtttgggacaaagggcgtgatttcgcgacggtgcgcaaggtactgagcatgcctcaagtcaatattgttaagaaaaccgaagtgcagacgggcgggttttccaaggaaagcatcttacccaaacgtaattcagataaacttattgcacgcaaaaaggactgggatccgaaaaagtatggaggcttcgacagtccaaccgtagcctactctgttctcgttgtagcgaaagtagaaaagggtaaatccaagaaactgaaatctgtcaaggagttgcttggaatcaccattatggagcgtagctccttcgagaagaacccgattgactttctggaagccaaaggatataaagaggtcaagaaagatcttatcattaagctgcctaagtattcactcttcgagctggaaaatggtcgtaaacgcatgctcgcttctgccggcgagttgcagaagggcaatgaattagcacttccatcaaagtacgttaacttcctgtatttggccagccattacgagaaactgaaggggtctccagaggacaacgaacagaaacaattatttgtagagcagcacaagcattatcttgatgaaatcattgagcaaatttccgaattcagtaaacgcgtaatcctggccgatgcaaacctcgacaaggtgctgagcgcttacaataagcatcgcgacaaacctatccgtgagcaggctgaaaatatcattcacctgttcacattaacgaacctgggcgctccggccgcttttaaatatttcgacacgacaatcgaccgtaagcgctataccagtacgaaagaagtgttggatgcgacccttattcaccagtcaattacaggattatatgagacccgtatcgaccttagccaattaggtggggatgcggcccatggtagacaggtgctgggcaagagaaagcggtga

SEQ ID NO: 273 - DNA, 4149 bp, synthetic construct
  source 1..4149: mol_type = other DNA
atggacaaaaagtactctattggcctggatatcgggaccaacagcgtcgggtgggctgttatcaccgacgagtataaagtaccttcgaaaaagttcaaagtgctgggcaacaccgatcgccattcaatcaaaaagaacttgattggtgcgctgttgtttgactccggggaaaccgccgaggcgactcgccttaaacgtacagcacgtcgccggtacactcggcgtaagaatcgcatttgctatttgcaggaaatctttagcaacgagatggcaaaagtcgatgactcgtttttccaccgcctcgaggaaagctttctggtggaggaagacaaaaagcatgagcgtcacccgatcttcggcaacattgtcgatgaagtagcgtatcatgaaaaatacccaaccatttaccacttacgcaaaaagctggtggacagcactgacaaagctgatttgcgccttatctatttagccctggcacatatgattaagtttcgtggtcacttcctgatcgaaggagacttaaatcccgacaacagtgatgttgataaattgtttattcagcttgtccaaacttacaatcaactgttcgaggaaaacccgatcaatgcctccggtgtggatgcaaaagccattttaagtgcacgccttagcaagtcccgtcgcttagaaaaccttatcgcgcagctgcccggcgagaaaaagaatggtttgtttgggaaccttattgccttgagcttaggcctcaccccgaatttcaaaagtaatttcgatcttgcagaagacgccaaattacaactgtcgaaggatacttatgatgacgatctcgataatctgttagcgcagattggtgaccaatacgccgatctttttctggcggctaaaaatctgagcgacgccatcttgctttcggatattctccgcgttaacaccgaaatcacgaaagcgcctcttagtgccagcatgattaaacgttatgatgaacaccaccaggacctgaccttactcaaagcgttggttcgccagcaactgccagagaagtacaaagaaatcttctttgatcagtcaaagaatggttatgccggctatattgacgggggtgcaagccaagaggaattctacaaatttatcaagcctattctggagaaaatggatggcaccgaagagttattggtgaagcttaaccgtgaagacctcctgcggaaacagcgcacattcgataatggttcgatcccacaccaaatccatttgggggagttacacgctattttgcgtcgccaggaagacttttaccctttcctgaaggataaccgggagaaaattgagaagatccttacctttcgtattccgtattacgtaggccccttagcacggggtaatagccgtttcgcgtggatgacacggaagtcggaagagacgatcaccccgtggaacttcgaagaggtagtcgacaagggcgcatcagcgcagtcttttattgaacgtatgacgaatttcgataaaaacttgcccaatgagaaggtgcttccgaaacattccttgttatatgaatattttacagtttacaacgagctgaccaaggttaaatacgtgacggaaggaatgcgcaagcccgcttttcttagcggtgagcaaaaaaaggcgatcgtcgacctgttattcaaaacgaatcgtaaggtgactgtaaagcaactcaaagaagattacttcaaaaagattgagtgcttcgacagcgtcgaaatctctggggtagaggatcggtttaacgcaagtttaggtacctaccatgacctgcttaaaatcattaaggataaagacttcttagataatgaagagaacgaagatattctcgaggacatcgtcttgacgttaaccttatttgaggatcgtgaaatgattgaggaacgcctcaaaacttatgcccacctgttcgacgataaggtgatgaagcagctgaaacgtcggcgctacacaggatggggccgcttgagtcgcaaacttattaacggaatccgtgacaagcaatccggcaaaacgattctggatttcttgaagtcggacggatttgctaatcgcaacttcatgcagttgatccatgatgactccctgacttttaaagaggatattcaaaaggcgcaggttagtggtcaaggcgacagcttacacgaacacatcgcaaatttggctggttcgccggccattaaaaaggggatcctccagaccgtgaaagttgtagatgagcttgttaaggtcatgggtcgtcataagcccgaaaacatcgtgattgaaatggcgcgggagaatcaaacgacccagaaaggacaaaagaatagccgtgaacggatgaagcggatcgaggaaggcattaaagagctggggtctcaaatcttgaaggaacaccctgtggagaacactcagctccaaaatgaaaaactttacctgtactatttgcagaacggacgcgatatgtacgtggaccaagagttggatattaatcggctgagtgactacgacgttgatcatatcgtcccgcagagcttcctcaaagacgattctattgacaataaggtactgacgcgctctgataaaaaccgtggtaagtcggacaacgtgccctccgaagaggttgtgaaaaagatgaaaaattattggcgccagcttttaaacgcgaagctgatcacacaacgtaaattcgataatttgaccaaggctgaacggggtggcctgagcgagttagataaggcaggatttattaaacgccagttagtggagactcgtcaaatcaccaaacatgtcgcgcagattttggacagccggatgaacaccaagtacgatgaaaatgacaaactgatccgtgaggtgaaagtcattactctgaagtccaaattagttagtgatttccggaaggactttcaattctacaaagtccgtgaaattaataactatcatcacgcacatgacgcgtacctgaatgcagtggttgggaccgcccttatcaagaaatatcctaagctggagtcggagtttgtctatggcgactataaggtatacgatgttcgcaaaatgattgcgaaatctgagcaggagatcggtaaggcaaccgcaaaatatttcttttactcaaacattatgaatttctttaagacagaaatcactctggccaacggggagattcgcaaacgtccgttgatcgaaacaaacggcgagactggcgaaattgtttgggacaaagggcgtgatttcgcgacggtgcgcaaggtactgagcatgcctcaagtcaatattgttaagaaaaccgaagtgcagacgggcgggttttccaaggaaagcatcttacccaaacgtaattcagataaacttattgcacgcaaaaaggactgggatccgaaaaagtatggaggcttcgacagtccaaccgtagcctactctgttctcgttgtagcgaaagtagaaaagggtaaatccaagaaactgaaatctgtcaaggagttgcttggaatcaccattatggagcgtagctccttcgagaagaacccgattgactttctggaagccaaaggatataaagaggtcaagaaagatcttatcattaagctgcctaagtattcactcttcgagctggaaaatggtcgtaaacgcatgctcgcttctgccggcgagttgcagaagggcaatgaattagcacttccatcaaagtacgttaacttcctgtatttggccagccattacgagaaactgaaggggtctccagaggacaacgaacagaaacaattatttgtagagcagcacaagcattatcttgatgaaatcattgagcaaatttccgaattcagtaaacgcgtaatcctggccgatgcaaacctcgacaaggtgctgagcgcttacaataagcatcgcgacaaacctatccgtgagcaggctgaaaatatcattcacctgttcacattaacgaacctgggcgctccggccgcttttaaatatttcgacacgacaatcgaccgtaagcgctataccagtacgaaagaagtgttggatgcgacccttattcaccagtcaattacaggattatatgagacccgtatcgaccttagccaattaggtggggatgcggccgtgcacaagacagtgctgggcaagagaaagtactggtga

SEQ ID NO: 274 - DNA, 4149 bp, synthetic construct
  source 1..4149: mol_type = other DNA
atggacaaaaagtactctattggcctggatatcgggaccaacagcgtcgggtgggctgttatcaccgacgagtataaagtaccttcgaaaaagttcaaagtgctgggcaacaccgatcgccattcaatcaaaaagaacttgattggtgcgctgttgtttgactccggggaaaccgccgaggcgactcgccttaaacgtacagcacgtcgccggtacactcggcgtaagaatcgcatttgctatttgcaggaaatctttagcaacgagatggcaaaagtcgatgactcgtttttccaccgcctcgaggaaagctttctggtggaggaagacaaaaagcatgagcgtcacccgatcttcggcaacattgtcgatgaagtagcgtatcatgaaaaatacccaaccatttaccacttacgcaaaaagctggtggacagcactgacaaagctgatttgcgccttatctatttagccctggcacatatgattaagtttcgtggtcacttcctgatcgaaggagacttaaatcccgacaacagtgatgttgataaattgtttattcagcttgtccaaacttacaatcaactgttcgaggaaaacccgatcaatgcctccggtgtggatgcaaaagccattttaagtgcacgccttagcaagtcccgtcgcttagaaaaccttatcgcgcagctgcccggcgagaaaaagaatggtttgtttgggaaccttattgccttgagcttaggcctcaccccgaatttcaaaagtaatttcgatcttgcagaagacgccaaattacaactgtcgaaggatacttatgatgacgatctcgataatctgttagcgcagattggtgaccaatacgccgatctttttctggcggctaaaaatctgagcgacgccatcttgctttcggatattctccgcgttaacaccgaaatcacgaaagcgcctcttagtgccagcatgattaaacgttatgatgaacaccaccaggacctgaccttactcaaagcgttggttcgccagcaactgccagagaagtacaaagaaatcttctttgatcagtcaaagaatggttatgccggctatattgacgggggtgcaagccaagaggaattctacaaatttatcaagcctattctggagaaaatggatggcaccgaagagttattggtgaagcttaaccgtgaagacctcctgcggaaacagcgcacattcgataatggttcgatcccacaccaaatccatttgggggagttacacgctattttgcgtcgccaggaagacttttaccctttcctgaaggataaccgggagaaaattgagaagatccttacctttcgtattccgtattacgtaggccccttagcacggggtaatagccgtttcgcgtggatgacacggaagtcggaagagacgatcaccccgtggaacttcgaagaggtagtcgacaagggcgcatcagcgcagtcttttattgaacgtatgacgaatttcgataaaaacttgcccaatgagaaggtgcttccgaaacattccttgttatatgaatattttacagtttacaacgagctgaccaaggttaaatacgtgacggaaggaatgcgcaagcccgcttttcttagcggtgagcaaaaaaaggcgatcgtcgacctgttattcaaaacgaatcgtaaggtgactgtaaagcaactcaaagaagattacttcaaaaagattgagtgcttcgacagcgtcgaaatctctggggtagaggatcggtttaacgcaagtttaggtacctaccatgacctgcttaaaatcattaaggataaagacttcttagataatgaagagaacgaagatattctcgaggacatcgtcttgacgttaaccttatttgaggatcgtgaaatgattgaggaacgcctcaaaacttatgcccacctgttcgacgataaggtgatgaagcagctgaaacgtcggcgctacacaggatggggccgcttgagtcgcaaacttattaacggaatccgtgacaagcaatccggcaaaacgattctggatttcttgaagtcggacggatttgctaatcgcaacttcatgcagttgatccatgatgactccctgacttttaaagaggatattcaaaaggcgcaggttagtggtcaaggcgacagcttacacgaacacatcgcaaatttggctggttcgccggccattaaaaaggggatcctccagaccgtgaaagttgtagatgagcttgttaaggtcatgggtcgtcataagcccgaaaacatcgtgattgaaatggcgcgggagaatcaaacgacccagaaaggacaaaagaatagccgtgaacggatgaagcggatcgaggaaggcattaaagagctggggtctcaaatcttgaaggaacaccctgtggagaacactcagctccaaaatgaaaaactttacctgtactatttgcagaacggacgcgatatgtacgtggaccaagagttggatattaatcggctgagtgactacgacgttgatcatatcgtcccgcagagcttcctcaaagacgattctattgacaataaggtactgacgcgctctgataaaaaccgtggtaagtcggacaacgtgccctccgaagaggttgtgaaaaagatgaaaaattattggcgccagcttttaaacgcgaagctgatcacacaacgtaaattcgataatttgaccaaggctgaacggggtggcctgagcgagttagataaggcaggatttattaaacgccagttagtggagactcgtcaaatcaccaaacatgtcgcgcagattttggacagccggatgaacaccaagtacgatgaaaatgacaaactgatccgtgaggtgaaagtcattactctgaagtccaaattagttagtgatttccggaaggactttcaattctacaaagtccgtgaaattaataactatcatcacgcacatgacgcgtacctgaatgcagtggttgggaccgcccttatcaagaaatatcctaagctggagtcggagtttgtctatggcgactataaggtatacgatgttcgcaaaatgattgcgaaatctgagcaggagatcggtaaggcaaccgcaaaatatttcttttactcaaacattatgaatttctttaagacagaaatcactctggccaacggggagattcgcaaacgtccgttgatcgaaacaaacggcgagactggcgaaattgtttgggacaaagggcgtgatttcgcgacggtgcgcaaggtactgagcatgcctcaagtcaatattgttaagaaaaccgaagtgcagacgggcgggttttccaaggaaagcatcttacccaaacgtaattcagataaacttattgcacgcaaaaaggactgggatccgaaaaagtatggaggcttcgacagtccaaccgtagcctactctgttctcgttgtagcgaaagtagaaaagggtaaatccaagaaactgaaatctgtcaaggagttgcttggaatcaccattatggagcgtagctccttcgagaagaacccgattgactttctggaagccaaaggatataaagaggtcaagaaagatcttatcattaagctgcctaagtattcactcttcgagctggaaaatggtcgtaaacgcatgctcgcttctgccggcgagttgcagaagggcaatgaattagcacttccatcaaagtacgttaacttcctgtatttggccagccattacgagaaactgaaggggtctccagaggacaacgaacagaaacaattatttgtagagcagcacaagcattatcttgatgaaatcattgagcaaatttccgaattcagtaaacgcgtaatcctggccgatgcaaacctcgacaaggtgctgagcgcttacaataagcatcgcgacaaacctatccgtgagcaggctgaaaatatcattcacctgttcacattaacgaacctgggcgctccggccgcttttaaatatttcgacacgacaatcgaccgtaagcgctataccagtacgaaagaagtgttggatgcgacccttattcaccagtcaattacaggattatatgagacccgtatcgaccttagccaattaggtggggatgcggccaagcggaagtacgccgtgttcctggaaagccagaactga

SEQ ID NO: 275 - DNA, 4149 bp, synthetic construct
  source 1..4149: mol_type = other DNA
atggacaaaaagtactctattggcctggatatcgggaccaacagcgtcgggtgggctgttatcaccgacgagtataaagtaccttcgaaaaagttcaaagtgctgggcaacaccgatcgccattcaatcaaaaagaacttgattggtgcgctgttgtttgactccggggaaaccgccgaggcgactcgccttaaacgtacagcacgtcgccggtacactcggcgtaagaatcgcatttgctatttgcaggaaatctttagcaacgagatggcaaaagtcgatgactcgtttttccaccgcctcgaggaaagctttctggtggaggaagacaaaaagcatgagcgtcacccgatcttcggcaacattgtcgatgaagtagcgtatcatgaaaaatacccaaccatttaccacttacgcaaaaagctggtggacagcactgacaaagctgatttgcgccttatctatttagccctggcacatatgattaagtttcgtggtcacttcctgatcgaaggagacttaaatcccgacaacagtgatgttgataaattgtttattcagcttgtccaaacttacaatcaactgttcgaggaaaacccgatcaatgcctccggtgtggatgcaaaagccattttaagtgcacgccttagcaagtcccgtcgcttagaaaaccttatcgcgcagctgcccggcgagaaaaagaatggtttgtttgggaaccttattgccttgagcttaggcctcaccccgaatttcaaaagtaatttcgatcttgcagaagacgccaaattacaactgtcgaaggatacttatgatgacgatctcgataatctgttagcgcagattggtgaccaatacgccgatctttttctggcggctaaaaatctgagcgacgccatcttgctttcggatattctccgcgttaacaccgaaatcacgaaagcgcctcttagtgccagcatgattaaacgttatgatgaacaccaccaggacctgaccttactcaaagcgttggttcgccagcaactgccagagaagtacaaagaaatcttctttgatcagtcaaagaatggttatgccggctatattgacgggggtgcaagccaagaggaattctacaaatttatcaagcctattctggagaaaatggatggcaccgaagagttattggtgaagcttaaccgtgaagacctcctgcggaaacagcgcacattcgataatggttcgatcccacaccaaatccatttgggggagttacacgctattttgcgtcgccaggaagacttttaccctttcctgaaggataaccgggagaaaattgagaagatccttacctttcgtattccgtattacgtaggccccttagcacggggtaatagccgtttcgcgtggatgacacggaagtcggaagagacgatcaccccgtggaacttcgaagaggtagtcgacaagggcgcatcagcgcagtcttttattgaacgtatgacgaatttcgataaaaacttgcccaatgagaaggtgcttccgaaacattccttgttatatgaatattttacagtttacaacgagctgaccaaggttaaatacgtgacggaaggaatgcgcaagcccgcttttcttagcggtgagcaaaaaaaggcgatcgtcgacctgttattcaaaacgaatcgtaaggtgactgtaaagcaactcaaagaagattacttcaaaaagattgagtgcttcgacagcgtcgaaatctctggggtagaggatcggtttaacgcaagtttaggtacctaccatgacctgcttaaaatcattaaggataaagacttcttagataatgaagagaacgaagatattctcgaggacatcgtcttgacgttaaccttatttgaggatcgtgaaatgattgaggaacgcctcaaaacttatgcccacctgttcgacgataaggtgatgaagcagctgaaacgtcggcgctacacaggatggggccgcttgagtcgcaaacttattaacggaatccgtgacaagcaatccggcaaaacgattctggatttcttgaagtcggacggatttgctaatcgcaacttcatgcagttgatccatgatgactccctgacttttaaagaggatattcaaaaggcgcaggttagtggtcaaggcgacagcttacacgaacacatcgcaaatttggctggttcgccggccattaaaaaggggatcctccagaccgtgaaagttgtagatgagcttgttaaggtcatgggtcgtcataagcccgaaaacatcgtgattgaaatggcgcgggagaatcaaacgacccagaaaggacaaaagaatagccgtgaacggatgaagcggatcgaggaaggcattaaagagctggggtctcaaatcttgaaggaacaccctgtggagaacactcagctccaaaatgaaaaactttacctgtactatttgcagaacggacgcgatatgtacgtggaccaagagttggatattaatcggctgagtgactacgacgttgatcatatcgtcccgcagagcttcctcaaagacgattctattgacaataaggtactgacgcgctctgataaaaaccgtggtaagtcggacaacgtgccctccgaagaggttgtgaaaaagatgaaaaattattggcgccagcttttaaacgcgaagctgatcacacaacgtaaattcgataatttgaccaaggctgaacggggtggcctgagcgagttagataaggcaggatttattaaacgccagttagtggagactcgtcaaatcaccaaacatgtcgcgcagattttggacagccggatgaacaccaagtacgatgaaaatgacaaactgatccgtgaggtgaaagtcattactctgaagtccaaattagttagtgatttccggaaggactttcaattctacaaagtccgtgaaattaataactatcatcacgcacatgacgcgtacctgaatgcagtggttgggaccgcccttatcaagaaatatcctaagctggagtcggagtttgtctatggcgactataaggtatacgatgttcgcaaaatgattgcgaaatctgagcaggagatcggtaaggcaaccgcaaaatatttcttttactcaaacattatgaatttctttaagacagaaatcactctggccaacggggagattcgcaaacgtccgttgatcgaaacaaacggcgagactggcgaaattgtttgggacaaagggcgtgatttcgcgacggtgcgcaaggtactgagcatgcctcaagtcaatattgttaagaaaaccgaagtgcagacgggcgggttttccaaggaaagcatcttacccaaacgtaattcagataaacttattgcacgcaaaaaggactgggatccgaaaaagtatggaggcttcgacagtccaaccgtagcctactctgttctcgttgtagcgaaagtagaaaagggtaaatccaagaaactgaaatctgtcaaggagttgcttggaatcaccattatggagcgtagctccttcgagaagaacccgattgactttctggaagccaaaggatataaagaggtcaagaaagatcttatcattaagctgcctaagtattcactcttcgagctggaaaatggtcgtaaacgcatgctcgcttctgccggcgagttgcagaagggcaatgaattagcacttccatcaaagtacgttaacttcctgtatttggccagccattacgagaaactgaaggggtctccagaggacaacgaacagaaacaattatttgtagagcagcacaagcattatcttgatgaaatcattgagcaaatttccgaattcagtaaacgcgtaatcctggccgatgcaaacctcgacaaggtgctgagcgcttacaataagcatcgcgacaaacctatccgtgagcaggctgaaaatatcattcacctgttcacattaacgaacctgggcgctccggccgcttttaaatatttcgacacgacaatcgaccgtaagcgctataccagtacgaaagaagtgttggatgcgacccttattcaccagtcaattacaggattatatgagacccgtatcgaccttagccaattaggtggggatgcggccaagagaaagtggatggccttcgtgatgggcgacccttga

SEQ ID NO: 276 - DNA, 4149 bp, synthetic construct
  source 1..4149: mol_type = other DNA
atggacaaaaagtactctattggcctggatatcgggaccaacagcgtcgggtgggctgttatcaccgacgagtataaagtaccttcgaaaaagttcaaagtgctgggcaacaccgatcgccattcaatcaaaaagaacttgattggtgcgctgttgtttgactccggggaaaccgccgaggcgactcgccttaaacgtacagcacgtcgccggtacactcggcgtaagaatcgcatttgctatttgcaggaaatctttagcaacgagatggcaaaagtcgatgactcgtttttccaccgcctcgaggaaagctttctggtggaggaagacaaaaagcatgagcgtcacccgatcttcggcaacattgtcgatgaagtagcgtatcatgaaaaatacccaaccatttaccacttacgcaaaaagctggtggacagcactgacaaagctgatttgcgccttatctatttagccctggcacatatgattaagtttcgtggtcacttcctgatcgaaggagacttaaatcccgacaacagtgatgttgataaattgtttattcagcttgtccaaacttacaatcaactgttcgaggaaaacccgatcaatgcctccggtgtggatgcaaaagccattttaagtgcacgccttagcaagtcccgtcgcttagaaaaccttatcgcgcagctgcccggcgagaaaaagaatggtttgtttgggaaccttattgccttgagcttaggcctcaccccgaatttcaaaagtaatttcgatcttgcagaagacgccaaattacaactgtcgaaggatacttatgatgacgatctcgataatctgttagcgcagattggtgaccaatacgccgatctttttctggcggctaaaaatctgagcgacgccatcttgctttcggatattctccgcgttaacaccgaaatcacgaaagcgcctcttagtgccagcatgattaaacgttatgatgaacaccaccaggacctgaccttactcaaagcgttggttcgccagcaactgccagagaagtacaaagaaatcttctttgatcagtcaaagaatggttatgccggctatattgacgggggtgcaagccaagaggaattctacaaatttatcaagcctattctggagaaaatggatggcaccgaagagttattggtgaagcttaaccgtgaagacctcctgcggaaacagcgcacattcgataatggttcgatcccacaccaaatccatttgggggagttacacgctattttgcgtcgccaggaagacttttaccctttcctgaaggataaccgggagaaaattgagaagatccttacctttcgtattccgtattacgtaggccccttagcacggggtaatagccgtttcgcgtggatgacacggaagtcggaagagacgatcaccccgtggaacttcgaagaggtagtcgacaagggcgcatcagcgcagtcttttattgaacgtatgacgaatttcgataaaaacttgcccaatgagaaggtgcttccgaaacattccttgttatatgaatattttacagtttacaacgagctgaccaaggttaaatacgtgacggaaggaatgcgcaagcccgcttttcttagcggtgagcaaaaaaaggcgatcgtcgacctgttattcaaaacgaatcgtaaggtgactgtaaagcaactcaaagaagattacttcaaaaagattgagtgcttcgacagcgtcgaaatctctggggtagaggatcggtttaacgcaagtttaggtacctaccatgacctgcttaaaatcattaaggataaagacttcttagataatgaagagaacgaagatattctcgaggacatcgtcttgacgttaaccttatttgaggatcgtgaaatgattgaggaacgcctcaaaacttatgcccacctgttcgacgataaggtgatgaagcagctgaaacgtcggcgctacacaggatggggccgcttgagtcgcaaacttattaacggaatccgtgacaagcaatccggcaaaacgattctggatttcttgaagtcggacggatttgctaatcgcaacttcatgcagttgatccatgatgactccctgacttttaaagaggatattcaaaaggcgcaggttagtggtcaaggcgacagcttacacgaacacatcgcaaatttggctggttcgccggccattaaaaaggggatcctccagaccgtgaaagttgtagatgagcttgttaaggtcatgggtcgtcataagcccgaaaacatcgtgattgaaatggcgcgggagaatcaaacgacccagaaaggacaaaagaatagccgtgaacggatgaagcggatcgaggaaggcattaaagagctggggtctcaaatcttgaaggaacaccctgtggagaacactcagctccaaaatgaaaaactttacctgtactatttgcagaacggacgcgatatgtacgtggaccaagagttggatattaatcggctgagtgactacgacgttgatcatatcgtcccgcagagcttcctcaaagacgattctattgacaataaggtactgacgcgctctgataaaaaccgtggtaagtcggacaacgtgccctccgaagaggttgtgaaaaagatgaaaaattattggcgccagcttttaaacgcgaagctgatcacacaacgtaaattcgataatttgaccaaggctgaacggggtggcctgagcgagttagataaggcaggatttattaaacgccagttagtggagactcgtcaaatcaccaaacatgtcgcgcagattttggacagccggatgaacaccaagtacgatgaaaatgacaaactgatccgtgaggtgaaagtcattactctgaagtccaaattagttagtgatttccggaaggactttcaattctacaaagtccgtgaaattaataactatcatcacgcacatgacgcgtacctgaatgcagtggttgggaccgcccttatcaagaaatatcctaagctggagtcggagtttgtctatggcgactataaggtatacgatgttcgcaaaatgattgcgaaatctgagcaggagatcggtaaggcaaccgcaaaatatttcttttactcaaacattatgaatttctttaagacagaaatcactctggccaacggggagattcgcaaacgtccgttgatcgaaacaaacggcgagactggcgaaattgtttgggacaaagggcgtgatttcgcgacggtgcgcaaggtactgagcatgcctcaagtcaatattgttaagaaaaccgaagtgcagacgggcgggttttccaaggaaagcatcttacccaaacgtaattcagataaacttattgcacgcaaaaaggactgggatccgaaaaagtatggaggcttcgacagtccaaccgtagcctactctgttctcgttgtagcgaaagtagaaaagggtaaatccaagaaactgaaatctgtcaaggagttgcttggaatcaccattatggagcgtagctccttcgagaagaacccgattgactttctggaagccaaaggatataaagaggtcaagaaagatcttatcattaagctgcctaagtattcactcttcgagctggaaaatggtcgtaaacgcatgctcgcttctgccggcgagttgcagaagggcaatgaattagcacttccatcaaagtacgttaacttcctgtatttggccagccattacgagaaactgaaggggtctccagaggacaacgaacagaaacaattatttgtagagcagcacaagcattatcttgatgaaatcattgagcaaatttccgaattcagtaaacgcgtaatcctggccgatgcaaacctcgacaaggtgctgagcgcttacaataagcatcgcgacaaacctatccgtgagcaggctgaaaatatcattcacctgttcacattaacgaacctgggcgctccggccgcttttaaatatttcgacacgacaatcgaccgtaagcgctataccagtacgaaagaagtgttggatgcgacccttattcaccagtcaattacaggattatatgagacccgtatcgaccttagccaattaggtggggatgcggccatccccagaaagagaagcttcgccgagctgtacgactga

SEQ ID NO: 277 - DNA, 4149 bp, synthetic construct
  source 1..4149: mol_type = other DNA
atggacaaaaagtactctattggcctggatatcgggaccaacagcgtcgggtgggctgttatcaccgacgagtataaagtaccttcgaaaaagttcaaagtgctgggcaacaccgatcgccattcaatcaaaaagaacttgattggtgcgctgttgtttgactccggggaaaccgccgaggcgactcgccttaaacgtacagcacgtcgccggtacactcggcgtaagaatcgcatttgctatttgcaggaaatctttagcaacgagatggcaaaagtcgatgactcgtttttccaccgcctcgaggaaagctttctggtggaggaagacaaaaagcatgagcgtcacccgatcttcggcaacattgtcgatgaagtagcgtatcatgaaaaatacccaaccatttaccacttacgcaaaaagctggtggacagcactgacaaagctgatttgcgccttatctatttagccctggcacatatgattaagtttcgtggtcacttcctgatcgaaggagacttaaatcccgacaacagtgatgttgataaattgtttattcagcttgtccaaacttacaatcaactgttcgaggaaaacccgatcaatgcctccggtgtggatgcaaaagccattttaagtgcacgccttagcaagtcccgtcgcttagaaaaccttatcgcgcagctgcccggcgagaaaaagaatggtttgtttgggaaccttattgccttgagcttaggcctcaccccgaatttcaaaagtaatttcgatcttgcagaagacgccaaattacaactgtcgaaggatacttatgatgacgatctcgataatctgttagcgcagattggtgaccaatacgccgatctttttctggcggctaaaaatctgagcgacgccatcttgctttcggatattctccgcgttaacaccgaaatcacgaaagcgcctcttagtgccagcatgattaaacgttatgatgaacaccaccaggacctgaccttactcaaagcgttggttcgccagcaactgccagagaagtacaaagaaatcttctttgatcagtcaaagaatggttatgccggctatattgacgggggtgcaagccaagaggaattctacaaatttatcaagcctattctggagaaaatggatggcaccgaagagttattggtgaagcttaaccgtgaagacctcctgcggaaacagcgcacattcgataatggttcgatcccacaccaaatccatttgggggagttacacgctattttgcgtcgccaggaagacttttaccctttcctgaaggataaccgggagaaaattgagaagatccttacctttcgtattccgtattacgtaggccccttagcacggggtaatagccgtttcgcgtggatgacacggaagtcggaagagacgatcaccccgtggaacttcgaagaggtagtcgacaagggcgcatcagcgcagtcttttattgaacgtatgacgaatttcgataaaaacttgcccaatgagaaggtgcttccgaaacattccttgttatatgaatattttacagtttacaacgagctgaccaaggttaaatacgtgacggaaggaatgcgcaagcccgcttttcttagcggtgagcaaaaaaaggcgatcgtcgacctgttattcaaaacgaatcgtaaggtgactgtaaagcaactcaaagaagattacttcaaaaagattgagtgcttcgacagcgtcgaaatctctggggtagaggatcggtttaacgcaagtttaggtacctaccatgacctgcttaaaatcattaaggataaagacttcttagataatgaagagaacgaagatattctcgaggacatcgtcttgacgttaaccttatttgaggatcgtgaaatgattgaggaacgcctcaaaacttatgcccacctgttcgacgataaggtgatgaagcagctgaaacgtcggcgctacacaggatggggccgcttgagtcgcaaacttattaacggaatccgtgacaagcaatccggcaaaacgattctggatttcttgaagtcggacggatttgctaatcgcaacttcatgcagttgatccatgatgactccctgacttttaaagaggatattcaaaaggcgcaggttagtggtcaaggcgacagcttacacgaacacatcgcaaatttggctggttcgccggccattaaaaaggggatcctccagaccgtgaaagttgtagatgagcttgttaaggtcatgggtcgtcataagcccgaaaacatcgtgattgaaatggcgcgggagaatcaaacgacccagaaaggacaaaagaatagccgtgaacggatgaagcggatcgaggaaggcattaaagagctggggtctcaaatcttgaaggaacaccctgtggagaacactcagctccaaaatgaaaaactttacctgtactatttgcagaacggacgcgatatgtacgtggaccaagagttggatattaatcggctgagtgactacgacgttgatcatatcgtcccgcagagcttcctcaaagacgattctattgacaataaggtactgacgcgctctgataaaaaccgtggtaagtcggacaacgtgccctccgaagaggttgtgaaaaagatgaaaaattattggcgccagcttttaaacgcgaagctgatcacacaacgtaaattcgataatttgaccaaggctgaacggggtggcctgagcgagttagataaggcaggatttattaaacgccagttagtggagactcgtcaaatcaccaaacatgtcgcgcagattttggacagccggatgaacaccaagtacgatgaaaatgacaaactgatccgtgaggtgaaagtcattactctgaagtccaaattagttagtgatttccggaaggactttcaattctacaaagtccgtgaaattaataactatcatcacgcacatgacgcgtacctgaatgcagtggttgggaccgcccttatcaagaaatatcctaagctggagtcggagtttgtctatggcgactataaggtatacgatgttcgcaaaatgattgcgaaatctgagcaggagatcggtaaggcaaccgcaaaatatttcttttactcaaacattatgaatttctttaagacagaaatcactctggccaacggggagattcgcaaacgtccgttgatcgaaacaaacggcgagactggcgaaattgtttgggacaaagggcgtgatttcgcgacggtgcgcaaggtactgagcatgcctcaagtcaatattgttaagaaaaccgaagtgcagacgggcgggttttccaaggaaagcatcttacccaaacgtaattcagataaacttattgcacgcaaaaaggactgggatccgaaaaagtatggaggcttcgacagtccaaccgtagcctactctgttctcgttgtagcgaaagtagaaaagggtaaatccaagaaactgaaatctgtcaaggagttgcttggaatcaccattatggagcgtagctccttcgagaagaacccgattgactttctggaagccaaaggatataaagaggtcaagaaagatcttatcattaagctgcctaagtattcactcttcgagctggaaaatggtcgtaaacgcatgctcgcttctgccggcgagttgcagaagggcaatgaattagcacttccatcaaagtacgttaacttcctgtatttggccagccattacgagaaactgaaggggtctccagaggacaacgaacagaaacaattatttgtagagcagcacaagcattatcttgatgaaatcattgagcaaatttccgaattcagtaaacgcgtaatcctggccgatgcaaacctcgacaaggtgctgagcgcttacaataagcatcgcgacaaacctatccgtgagcaggctgaaaatatcattcacctgttcacattaacgaacctgggcgctccggccgcttttaaatatttcgacacgacaatcgaccgtaagcgctataccagtacgaaagaagtgttggatgcgacccttattcaccagtcaattacaggattatatgagacccgtatcgaccttagccaattaggtggggatgcggcctgggccggaagaaaaagaacatggcgggacgccttctga

SEQ ID NO: 278 - DNA, 4149 bp, synthetic construct
  source 1..4149: mol_type = other DNA
atggacaaaaagtactctattggcctggatatcgggaccaacagcgtcgggtgggctgttatcaccgacgagtataaagtaccttcgaaaaagttcaaagtgctgggcaacaccgatcgccattcaatcaaaaagaacttgattggtgcgctgttgtttgactccggggaaaccgccgaggcgactcgccttaaacgtacagcacgtcgccggtacactcggcgtaagaatcgcatttgctatttgcaggaaatctttagcaacgagatggcaaaagtcgatgactcgtttttccaccgcctcgaggaaagctttctggtggaggaagacaaaaagcatgagcgtcacccgatcttcggcaacattgtcgatgaagtagcgtatcatgaaaaatacccaaccatttaccacttacgcaaaaagctggtggacagcactgacaaagctgatttgcgccttatctatttagccctggcacatatgattaagtttcgtggtcacttcctgatcgaaggagacttaaatcccgacaacagtgatgttgataaattgtttattcagcttgtccaaacttacaatcaactgttcgaggaaaacccgatcaatgcctccggtgtggatgcaaaagccattttaagtgcacgccttagcaagtcccgtcgcttagaaaaccttatcgcgcagctgcccggcgagaaaaagaatggtttgtttgggaaccttattgccttgagcttaggcctcaccccgaatttcaaaagtaatttcgatcttgcagaagacgccaaattacaactgtcgaaggatacttatgatgacgatctcgataatctgttagcgcagattggtgaccaatacgccgatctttttctggcggctaaaaatctgagcgacgccatcttgctttcggatattctccgcgttaacaccgaaatcacgaaagcgcctcttagtgccagcatgattaaacgttatgatgaacaccaccaggacctgaccttactcaaagcgttggttcgccagcaactgccagagaagtacaaagaaatcttctttgatcagtcaaagaatggttatgccggctatattgacgggggtgcaagccaagaggaattctacaaatttatcaagcctattctggagaaaatggatggcaccgaagagttattggtgaagcttaaccgtgaagacctcctgcggaaacagcgcacattcgataatggttcgatcccacaccaaatccatttgggggagttacacgctattttgcgtcgccaggaagacttttaccctttcctgaaggataaccgggagaaaattgagaagatccttacctttcgtattccgtattacgtaggccccttagcacggggtaatagccgtttcgcgtggatgacacggaagtcggaagagacgatcaccccgtggaacttcgaagaggtagtcgacaagggcgcatcagcgcagtcttttattgaacgtatgacgaatttcgataaaaacttgcccaatgagaaggtgcttccgaaacattccttgttatatgaatattttacagtttacaacgagctgaccaaggttaaatacgtgacggaaggaatgcgcaagcccgcttttcttagcggtgagcaaaaaaaggcgatcgtcgacctgttattcaaaacgaatcgtaaggtgactgtaaagcaactcaaagaagattacttcaaaaagattgagtgcttcgacagcgtcgaaatctctggggtagaggatcggtttaacgcaagtttaggtacctaccatgacctgcttaaaatcattaaggataaagacttcttagataatgaagagaacgaagatattctcgaggacatcgtcttgacgttaaccttatttgaggatcgtgaaatgattgaggaacgcctcaaaacttatgcccacctgttcgacgataaggtgatgaagcagctgaaacgtcggcgctacacaggatggggccgcttgagtcgcaaacttattaacggaatccgtgacaagcaatccggcaaaacgattctggatttcttgaagtcggacggatttgctaatcgcaacttcatgcagttgatccatgatgactccctgacttttaaagaggatattcaaaaggcgcaggttagtggtcaaggcgacagcttacacgaacacatcgcaaatttggctggttcgccggccattaaaaaggggatcctccagaccgtgaaagttgtagatgagcttgttaaggtcatgggtcgtcataagcccgaaaacatcgtgattgaaatggcgcgggagaatcaaacgacccagaaaggacaaaagaatagccgtgaacggatgaagcggatcgaggaaggcattaaagagctggggtctcaaatcttgaaggaacaccctgtggagaacactcagctccaaaatgaaaaactttacctgtactatttgcagaacggacgcgatatgtacgtggaccaagagttggatattaatcggctgagtgactacgacgttgatcatatcgtcccgcagagcttcctcaaagacgattctattgacaataaggtactgacgcgctctgataaaaaccgtggtaagtcggacaacgtgccctccgaagaggttgtgaaaaagatgaaaaattattggcgccagcttttaaacgcgaagctgatcacacaacgtaaattcgataatttgaccaaggctgaacggggtggcctgagcgagttagataaggcaggatttattaaacgccagttagtggagactcgtcaaatcaccaaacatgtcgcgcagattttggacagccggatgaacaccaagtacgatgaaaatgacaaactgatccgtgaggtgaaagtcattactctgaagtccaaattagttagtgatttccggaaggactttcaattctacaaagtccgtgaaattaataactatcatcacgcacatgacgcgtacctgaatgcagtggttgggaccgcccttatcaagaaatatcctaagctggagtcggagtttgtctatggcgactataaggtatacgatgttcgcaaaatgattgcgaaatctgagcaggagatcggtaaggcaaccgcaaaatatttcttttactcaaacattatgaatttctttaagacagaaatcactctggccaacggggagattcgcaaacgtccgttgatcgaaacaaacggcgagactggcgaaattgtttgggacaaagggcgtgatttcgcgacggtgcgcaaggtactgagcatgcctcaagtcaatattgttaagaaaaccgaagtgcagacgggcgggttttccaaggaaagcatcttacccaaacgtaattcagataaacttattgcacgcaaaaaggactgggatccgaaaaagtatggaggcttcgacagtccaaccgtagcctactctgttctcgttgtagcgaaagtagaaaagggtaaatccaagaaactgaaatctgtcaaggagttgcttggaatcaccattatggagcgtagctccttcgagaagaacccgattgactttctggaagccaaaggatataaagaggtcaagaaagatcttatcattaagctgcctaagtattcactcttcgagctggaaaatggtcgtaaacgcatgctcgcttctgccggcgagttgcagaagggcaatgaattagcacttccatcaaagtacgttaacttcctgtatttggccagccattacgagaaactgaaggggtctccagaggacaacgaacagaaacaattatttgtagagcagcacaagcattatcttgatgaaatcattgagcaaatttccgaattcagtaaacgcgtaatcctggccgatgcaaacctcgacaaggtgctgagcgcttacaataagcatcgcgacaaacctatccgtgagcaggctgaaaatatcattcacctgttcacattaacgaacctgggcgctccggccgcttttaaatatttcgacacgacaatcgaccgtaagcgctataccagtacgaaagaagtgttggatgcgacccttattcaccagtcaattacaggattatatgagacccgtatcgaccttagccaattaggtggggatgcggccagactgacccctagaaagcgggcctttagcgaggtttga

SEQ ID NO: 279 - DNA, 4149 bp, synthetic construct
  source 1..4149: mol_type = other DNA
atggacaaaaagtactctattggcctggatatcgggaccaacagcgtcgggtgggctgttatcaccgacgagtataaagtaccttcgaaaaagttcaaagtgctgggcaacaccgatcgccattcaatcaaaaagaacttgattggtgcgctgttgtttgactccggggaaaccgccgaggcgactcgccttaaacgtacagcacgtcgccggtacactcggcgtaagaatcgcatttgctatttgcaggaaatctttagcaacgagatggcaaaagtcgatgactcgtttttccaccgcctcgaggaaagctttctggtggaggaagacaaaaagcatgagcgtcacccgatcttcggcaacattgtcgatgaagtagcgtatcatgaaaaatacccaaccatttaccacttacgcaaaaagctggtggacagcactgacaaagctgatttgcgccttatctatttagccctggcacatatgattaagtttcgtggtcacttcctgatcgaaggagacttaaatcccgacaacagtgatgttgataaattgtttattcagcttgtccaaacttacaatcaactgttcgaggaaaacccgatcaatgcctccggtgtggatgcaaaagccattttaagtgcacgccttagcaagtcccgtcgcttagaaaaccttatcgcgcagctgcccggcgagaaaaagaatggtttgtttgggaaccttattgccttgagcttaggcctcaccccgaatttcaaaagtaatttcgatcttgcagaagacgccaaattacaactgtcgaaggatacttatgatgacgatctcgataatctgttagcgcagattggtgaccaatacgccgatctttttctggcggctaaaaatctgagcgacgccatcttgctttcggatattctccgcgttaacaccgaaatcacgaaagcgcctcttagtgccagcatgattaaacgttatgatgaacaccaccaggacctgaccttactcaaagcgttggttcgccagcaactgccagagaagtacaaagaaatcttctttgatcagtcaaagaatggttatgccggctatattgacgggggtgcaagccaagaggaattctacaaatttatcaagcctattctggagaaaatggatggcaccgaagagttattggtgaagcttaaccgtgaagacctcctgcggaaacagcgcacattcgataatggttcgatcccacaccaaatccatttgggggagttacacgctattttgcgtcgccaggaagacttttaccctttcctgaaggataaccgggagaaaattgagaagatccttacctttcgtattccgtattacgtaggccccttagcacggggtaatagccgtttcgcgtggatgacacggaagtcggaagagacgatcaccccgtggaacttcgaagaggtagtcgacaagggcgcatcagcgcagtcttttattgaacgtatgacgaatttcgataaaaacttgcccaatgagaaggtgcttccgaaacattccttgttatatgaatattttacagtttacaacgagctgaccaaggttaaatacgtgacggaaggaatgcgcaagcccgcttttcttagcggtgagcaaaaaaaggcgatcgtcgacctgttattcaaaacgaatcgtaaggtgactgtaaagcaactcaaagaagattacttcaaaaagattgagtgcttcgacagcgtcgaaatctctggggtagaggatcggtttaacgcaagtttaggtacctaccatgacctgcttaaaatcattaaggataaagacttcttagataatgaagagaacgaagatattctcgaggacatcgtcttgacgttaaccttatttgaggatcgtgaaatgattgaggaacgcctcaaaacttatgcccacctgttcgacgataaggtgatgaagcagctgaaacgtcggcgctacacaggatggggccgcttgagtcgcaaacttattaacggaatccgtgacaagcaatccggcaaaacgattctggatttcttgaagtcggacggatttgctaatcgcaacttcatgcagttgatccatgatgactccctgacttttaaagaggatattcaaaaggcgcaggttagtggtcaaggcgacagcttacacgaacacatcgcaaatttggctggttcgccggccattaaaaaggggatcctccagaccgtgaaagttgtagatgagcttgttaaggtcatgggtcgtcataagcccgaaaacatcgtgattgaaatggcgcgggagaatcaaacgacccagaaaggacaaaagaatagccgtgaacggatgaagcggatcgaggaaggcattaaagagctggggtctcaaatcttgaaggaacaccctgtggagaacactcagctccaaaatgaaaaactttacctgtactatttgcagaacggacgcgatatgtacgtggaccaagagttggatattaatcggctgagtgactacgacgttgatcatatcgtcccgcagagcttcctcaaagacgattctattgacaataaggtactgacgcgctctgataaaaaccgtggtaagtcggacaacgtgccctccgaagaggttgtgaaaaagatgaaaaattattggcgccagcttttaaacgcgaagctgatcacacaacgtaaattcgataatttgaccaaggctgaacggggtggcctgagcgagttagataaggcaggatttattaaacgccagttagtggagactcgtcaaatcaccaaacatgtcgcgcagattttggacagccggatgaacaccaagtacgatgaaaatgacaaactgatccgtgaggtgaaagtcattactctgaagtccaaattagttagtgatttccggaaggactttcaattctacaaagtccgtgaaattaataactatcatcacgcacatgacgcgtacctgaatgcagtggttgggaccgcccttatcaagaaatatcctaagctggagtcggagtttgtctatggcgactataaggtatacgatgttcgcaaaatgattgcgaaatctgagcaggagatcggtaaggcaaccgcaaaatatttcttttactcaaacattatgaatttctttaagacagaaatcactctggccaacggggagattcgcaaacgtccgttgatcgaaacaaacggcgagactggcgaaattgtttgggacaaagggcgtgatttcgcgacggtgcgcaaggtactgagcatgcctcaagtcaatattgttaagaaaaccgaagtgcagacgggcgggttttccaaggaaagcatcttacccaaacgtaattcagataaacttattgcacgcaaaaaggactgggatccgaaaaagtatggaggcttcgacagtccaaccgtagcctactctgttctcgttgtagcgaaagtagaaaagggtaaatccaagaaactgaaatctgtcaaggagttgcttggaatcaccattatggagcgtagctccttcgagaagaacccgattgactttctggaagccaaaggatataaagaggtcaagaaagatcttatcattaagctgcctaagtattcactcttcgagctggaaaatggtcgtaaacgcatgctcgcttctgccggcgagttgcagaagggcaatgaattagcacttccatcaaagtacgttaacttcctgtatttggccagccattacgagaaactgaaggggtctccagaggacaacgaacagaaacaattatttgtagagcagcacaagcattatcttgatgaaatcattgagcaaatttccgaattcagtaaacgcgtaatcctggccgatgcaaacctcgacaaggtgctgagcgcttacaataagcatcgcgacaaacctatccgtgagcaggctgaaaatatcattcacctgttcacattaacgaacctgggcgctccggccgcttttaaatatttcgacacgacaatcgaccgtaagcgctataccagtacgaaagaagtgttggatgcgacccttattcaccagtcaattacaggattatatgagacccgtatcgaccttagccaattaggtggggatgcggcccagtctgtgctgggcaagagaaagagcagacccttctga

SEQ ID NO: 280 - DNA, 4149 bp, synthetic construct
  source 1..4149: mol_type = other DNA
atggacaaaaagtactctattggcctggatatcgggaccaacagcgtcgggtgggctgttatcaccgacgagtataaagtaccttcgaaaaagttcaaagtgctgggcaacaccgatcgccattcaatcaaaaagaacttgattggtgcgctgttgtttgactccggggaaaccgccgaggcgactcgccttaaacgtacagcacgtcgccggtacactcggcgtaagaatcgcatttgctatttgcaggaaatctttagcaacgagatggcaaaagtcgatgactcgtttttccaccgcctcgaggaaagctttctggtggaggaagacaaaaagcatgagcgtcacccgatcttcggcaacattgtcgatgaagtagcgtatcatgaaaaatacccaaccatttaccacttacgcaaaaagctggtggacagcactgacaaagctgatttgcgccttatctatttagccctggcacatatgattaagtttcgtggtcacttcctgatcgaaggagacttaaatcccgacaacagtgatgttgataaattgtttattcagcttgtccaaacttacaatcaactgttcgaggaaaacccgatcaatgcctccggtgtggatgcaaaagccattttaagtgcacgccttagcaagtcccgtcgcttagaaaaccttatcgcgcagctgcccggcgagaaaaagaatggtttgtttgggaaccttattgccttgagcttaggcctcaccccgaatttcaaaagtaatttcgatcttgcagaagacgccaaattacaactgtcgaaggatacttatgatgacgatctcgataatctgttagcgcagattggtgaccaatacgccgatctttttctggcggctaaaaatctgagcgacgccatcttgctttcggatattctccgcgttaacaccgaaatcacgaaagcgcctcttagtgccagcatgattaaacgttatgatgaacaccaccaggacctgaccttactcaaagcgttggttcgccagcaactgccagagaagtacaaagaaatcttctttgatcagtcaaagaatggttatgccggctatattgacgggggtgcaagccaagaggaattctacaaatttatcaagcctattctggagaaaatggatggcaccgaagagttattggtgaagcttaaccgtgaagacctcctgcggaaacagcgcacattcgataatggttcgatcccacaccaaatccatttgggggagttacacgctattttgcgtcgccaggaagacttttaccctttcctgaaggataaccgggagaaaattgagaagatccttacctttcgtattccgtattacgtaggccccttagcacggggtaatagccgtttcgcgtggatgacacggaagtcggaagagacgatcaccccgtggaacttcgaagaggtagtcgacaagggcgcatcagcgcagtcttttattgaacgtatgacgaatttcgataaaaacttgcccaatgagaaggtgcttccgaaacattccttgttatatgaatattttacagtttacaacgagctgaccaaggttaaatacgtgacggaaggaatgcgcaagcccgcttttcttagcggtgagcaaaaaaaggcgatcgtcgacctgttattcaaaacgaatcgtaaggtgactgtaaagcaactcaaagaagattacttcaaaaagattgagtgcttcgacagcgtcgaaatctctggggtagaggatcggtttaacgcaagtttaggtacctaccatgacctgcttaaaatcattaaggataaagacttcttagataatgaagagaacgaagatattctcgaggacatcgtcttgacgttaaccttatttgaggatcgtgaaatgattgaggaacgcctcaaaacttatgcccacctgttcgacgataaggtgatgaagcagctgaaacgtcggcgctacacaggatggggccgcttgagtcgcaaacttattaacggaatccgtgacaagcaatccggcaaaacgattctggatttcttgaagtcggacggatttgctaatcgcaacttcatgcagttgatccatgatgactccctgacttttaaagaggatattcaaaaggcgcaggttagtggtcaaggcgacagcttacacgaacacatcgcaaatttggctggttcgccggccattaaaaaggggatcctccagaccgtgaaagttgtagatgagcttgttaaggtcatgggtcgtcataagcccgaaaacatcgtgattgaaatggcgcgggagaatcaaacgacccagaaaggacaaaagaatagccgtgaacggatgaagcggatcgaggaaggcattaaagagctggggtctcaaatcttgaaggaacaccctgtggagaacactcagctccaaaatgaaaaactttacctgtactatttgcagaacggacgcgatatgtacgtggaccaagagttggatattaatcggctgagtgactacgacgttgatcatatcgtcccgcagagcttcctcaaagacgattctattgacaataaggtactgacgcgctctgataaaaaccgtggtaagtcggacaacgtgccctccgaagaggttgtgaaaaagatgaaaaattattggcgccagcttttaaacgcgaagctgatcacacaacgtaaattcgataatttgaccaaggctgaacggggtggcctgagcgagttagataaggcaggatttattaaacgccagttagtggagactcgtcaaatcaccaaacatgtcgcgcagattttggacagccggatgaacaccaagtacgatgaaaatgacaaactgatccgtgaggtgaaagtcattactctgaagtccaaattagttagtgatttccggaaggactttcaattctacaaagtccgtgaaattaataactatcatcacgcacatgacgcgtacctgaatgcagtggttgggaccgcccttatcaagaaatatcctaagctggagtcggagtttgtctatggcgactataaggtatacgatgttcgcaaaatgattgcgaaatctgagcaggagatcggtaaggcaaccgcaaaatatttcttttactcaaacattatgaatttctttaagacagaaatcactctggccaacggggagattcgcaaacgtccgttgatcgaaacaaacggcgagactggcgaaattgtttgggacaaagggcgtgatttcgcgacggtgcgcaaggtactgagcatgcctcaagtcaatattgttaagaaaaccgaagtgcagacgggcgggttttccaaggaaagcatcttacccaaacgtaattcagataaacttattgcacgcaaaaaggactgggatccgaaaaagtatggaggcttcgacagtccaaccgtagcctactctgttctcgttgtagcgaaagtagaaaagggtaaatccaagaaactgaaatctgtcaaggagttgcttggaatcaccattatggagcgtagctccttcgagaagaacccgattgactttctggaagccaaaggatataaagaggtcaagaaagatcttatcattaagctgcctaagtattcactcttcgagctggaaaatggtcgtaaacgcatgctcgcttctgccggcgagttgcagaagggcaatgaattagcacttccatcaaagtacgttaacttcctgtatttggccagccattacgagaaactgaaggggtctccagaggacaacgaacagaaacaattatttgtagagcagcacaagcattatcttgatgaaatcattgagcaaatttccgaattcagtaaacgcgtaatcctggccgatgcaaacctcgacaaggtgctgagcgcttacaataagcatcgcgacaaacctatccgtgagcaggctgaaaatatcattcacctgttcacattaacgaacctgggcgctccggccgcttttaaatatttcgacacgacaatcgaccgtaagcgctataccagtacgaaagaagtgttggatgcgacccttattcaccagtcaattacaggattatatgagacccgtatcgaccttagccaattaggtggggatgcggccagcagccaccggaagagaaagttcagcgacgccttctga

SEQ ID NO: 281 - DNA, 4149 bp, synthetic construct
  source 1..4149: mol_type = other DNA
atggacaaaaagtactctattggcctggatatcgggaccaacagcgtcgggtgggctgttatcaccgacgagtataaagtaccttcgaaaaagttcaaagtgctgggcaacaccgatcgccattcaatcaaaaagaacttgattggtgcgctgttgtttgactccggggaaaccgccgaggcgactcgccttaaacgtacagcacgtcgccggtacactcggcgtaagaatcgcatttgctatttgcaggaaatctttagcaacgagatggcaaaagtcgatgactcgtttttccaccgcctcgaggaaagctttctggtggaggaagacaaaaagcatgagcgtcacccgatcttcggcaacattgtcgatgaagtagcgtatcatgaaaaatacccaaccatttaccacttacgcaaaaagctggtggacagcactgacaaagctgatttgcgccttatctatttagccctggcacatatgattaagtttcgtggtcacttcctgatcgaaggagacttaaatcccgacaacagtgatgttgataaattgtttattcagcttgtccaaacttacaatcaactgttcgaggaaaacccgatcaatgcctccggtgtggatgcaaaagccattttaagtgcacgccttagcaagtcccgtcgcttagaaaaccttatcgcgcagctgcccggcgagaaaaagaatggtttgtttgggaaccttattgccttgagcttaggcctcaccccgaatttcaaaagtaatttcgatcttgcagaagacgccaaattacaactgtcgaaggatacttatgatgacgatctcgataatctgttagcgcagattggtgaccaatacgccgatctttttctggcggctaaaaatctgagcgacgccatcttgctttcggatattctccgcgttaacaccgaaatcacgaaagcgcctcttagtgccagcatgattaaacgttatgatgaacaccaccaggacctgaccttactcaaagcgttggttcgccagcaactgccagagaagtacaaagaaatcttctttgatcagtcaaagaatggttatgccggctatattgacgggggtgcaagccaagaggaattctacaaatttatcaagcctattctggagaaaatggatggcaccgaagagttattggtgaagcttaaccgtgaagacctcctgcggaaacagcgcacattcgataatggttcgatcccacaccaaatccatttgggggagttacacgctattttgcgtcgccaggaagacttttaccctttcctgaaggataaccgggagaaaattgagaagatccttacctttcgtattccgtattacgtaggccccttagcacggggtaatagccgtttcgcgtggatgacacggaagtcggaagagacgatcaccccgtggaacttcgaagaggtagtcgacaagggcgcatcagcgcagtcttttattgaacgtatgacgaatttcgataaaaacttgcccaatgagaaggtgcttccgaaacattccttgttatatgaatattttacagtttacaacgagctgaccaaggttaaatacgtgacggaaggaatgcgcaagcccgcttttcttagcggtgagcaaaaaaaggcgatcgtcgacctgttattcaaaacgaatcgtaaggtgactgtaaagcaactcaaagaagattacttcaaaaagattgagtgcttcgacagcgtcgaaatctctggggtagaggatcggtttaacgcaagtttaggtacctaccatgacctgcttaaaatcattaaggataaagacttcttagataatgaagagaacgaagatattctcgaggacatcgtcttgacgttaaccttatttgaggatcgtgaaatgattgaggaacgcctcaaaacttatgcccacctgttcgacgataaggtgatgaagcagctgaaacgtcggcgctacacaggatggggccgcttgagtcgcaaacttattaacggaatccgtgacaagcaatccggcaaaacgattctggatttcttgaagtcggacggatttgctaatcgcaacttcatgcagttgatccatgatgactccctgacttttaaagaggatattcaaaaggcgcaggttagtggtcaaggcgacagcttacacgaacacatcgcaaatttggctggttcgccggccattaaaaaggggatcctccagaccgtgaaagttgtagatgagcttgttaaggtcatgggtcgtcataagcccgaaaacatcgtgattgaaatggcgcgggagaatcaaacgacccagaaaggacaaaagaatagccgtgaacggatgaagcggatcgaggaaggcattaaagagctggggtctcaaatcttgaaggaacaccctgtggagaacactcagctccaaaatgaaaaactttacctgtactatttgcagaacggacgcgatatgtacgtggaccaagagttggatattaatcggctgagtgactacgacgttgatcatatcgtcccgcagagcttcctcaaagacgattctattgacaataaggtactgacgcgctctgataaaaaccgtggtaagtcggacaacgtgccctccgaagaggttgtgaaaaagatgaaaaattattggcgccagcttttaaacgcgaagctgatcacacaacgtaaattcgataatttgaccaaggctgaacggggtggcctgagcgagttagataaggcaggatttattaaacgccagttagtggagactcgtcaaatcaccaaacatgtcgcgcagattttggacagccggatgaacaccaagtacgatgaaaatgacaaactgatccgtgaggtgaaagtcattactctgaagtccaaattagttagtgatttccggaaggactttcaattctacaaagtccgtgaaattaataactatcatcacgcacatgacgcgtacctgaatgcagtggttgggaccgcccttatcaagaaatatcctaagctggagtcggagtttgtctatggcgactataaggtatacgatgttcgcaaaatgattgcgaaatctgagcaggagatcggtaaggcaaccgcaaaatatttcttttactcaaacattatgaatttctttaagacagaaatcactctggccaacggggagattcgcaaacgtccgttgatcgaaacaaacggcgagactggcgaaattgtttgggacaaagggcgtgatttcgcgacggtgcgcaaggtactgagcatgcctcaagtcaatattgttaagaaaaccgaagtgcagacgggcgggttttccaaggaaagcatcttacccaaacgtaattcagataaacttattgcacgcaaaaaggactgggatccgaaaaagtatggaggcttcgacagtccaaccgtagcctactctgttctcgttgtagcgaaagtagaaaagggtaaatccaagaaactgaaatctgtcaaggagttgcttggaatcaccattatggagcgtagctccttcgagaagaacccgattgactttctggaagccaaaggatataaagaggtcaagaaagatcttatcattaagctgcctaagtattcactcttcgagctggaaaatggtcgtaaacgcatgctcgcttctgccggcgagttgcagaagggcaatgaattagcacttccatcaaagtacgttaacttcctgtatttggccagccattacgagaaactgaaggggtctccagaggacaacgaacagaaacaattatttgtagagcagcacaagcattatcttgatgaaatcattgagcaaatttccgaattcagtaaacgcgtaatcctggccgatgcaaacctcgacaaggtgctgagcgcttacaataagcatcgcgacaaacctatccgtgagcaggctgaaaatatcattcacctgttcacattaacgaacctgggcgctccggccgcttttaaatatttcgacacgacaatcgaccgtaagcgctataccagtacgaaagaagtgttggatgcgacccttattcaccagtcaattacaggattatatgagacccgtatcgaccttagccaattaggtggggatgcggcccccagccaccggaagagaaagttcagcgacgccttctga

SEQ ID NO: 282 - DNA, 4149 bp, synthetic construct
  source 1..4149: mol_type = other DNA
atggacaaaaagtactctattggcctggatatcgggaccaacagcgtcgggtgggctgttatcaccgacgagtataaagtaccttcgaaaaagttcaaagtgctgggcaacaccgatcgccattcaatcaaaaagaacttgattggtgcgctgttgtttgactccggggaaaccgccgaggcgactcgccttaaacgtacagcacgtcgccggtacactcggcgtaagaatcgcatttgctatttgcaggaaatctttagcaacgagatggcaaaagtcgatgactcgtttttccaccgcctcgaggaaagctttctggtggaggaagacaaaaagcatgagcgtcacccgatcttcggcaacattgtcgatgaagtagcgtatcatgaaaaatacccaaccatttaccacttacgcaaaaagctggtggacagcactgacaaagctgatttgcgccttatctatttagccctggcacatatgattaagtttcgtggtcacttcctgatcgaaggagacttaaatcccgacaacagtgatgttgataaattgtttattcagcttgtccaaacttacaatcaactgttcgaggaaaacccgatcaatgcctccggtgtggatgcaaaagccattttaagtgcacgccttagcaagtcccgtcgcttagaaaaccttatcgcgcagctgcccggcgagaaaaagaatggtttgtttgggaaccttattgccttgagcttaggcctcaccccgaatttcaaaagtaatttcgatcttgcagaagacgccaaattacaactgtcgaaggatacttatgatgacgatctcgataatctgttagcgcagattggtgaccaatacgccgatctttttctggcggctaaaaatctgagcgacgccatcttgctttcggatattctccgcgttaacaccgaaatcacgaaagcgcctcttagtgccagcatgattaaacgttatgatgaacaccaccaggacctgaccttactcaaagcgttggttcgccagcaactgccagagaagtacaaagaaatcttctttgatcagtcaaagaatggttatgccggctatattgacgggggtgcaagccaagaggaattctacaaatttatcaagcctattctggagaaaatggatggcaccgaagagttattggtgaagcttaaccgtgaagacctcctgcggaaacagcgcacattcgataatggttcgatcccacaccaaatccatttgggggagttacacgctattttgcgtcgccaggaagacttttaccctttcctgaaggataaccgggagaaaattgagaagatccttacctttcgtattccgtattacgtaggccccttagcacggggtaatagccgtttcgcgtggatgacacggaagtcggaagagacgatcaccccgtggaacttcgaagaggtagtcgacaagggcgcatcagcgcagtcttttattgaacgtatgacgaatttcgataaaaacttgcccaatgagaaggtgcttccgaaacattccttgttatatgaatattttacagtttacaacgagctgaccaaggttaaatacgtgacggaaggaatgcgcaagcccgcttttcttagcggtgagcaaaaaaaggcgatcgtcgacctgttattcaaaacgaatcgtaaggtgactgtaaagcaactcaaagaagattacttcaaaaagattgagtgcttcgacagcgtcgaaatctctggggtagaggatcggtttaacgcaagtttaggtacctaccatgacctgcttaaaatcattaaggataaagacttcttagataatgaagagaacgaagatattctcgaggacatcgtcttgacgttaaccttatttgaggatcgtgaaatgattgaggaacgcctcaaaacttatgcccacctgttcgacgataaggtgatgaagcagctgaaacgtcggcgctacacaggatggggccgcttgagtcgcaaacttattaacggaatccgtgacaagcaatccggcaaaacgattctggatttcttgaagtcggacggatttgctaatcgcaacttcatgcagttgatccatgatgactccctgacttttaaagaggatattcaaaaggcgcaggttagtggtcaaggcgacagcttacacgaacacatcgcaaatttggctggttcgccggccattaaaaaggggatcctccagaccgtgaaagttgtagatgagcttgttaaggtcatgggtcgtcataagcccgaaaacatcgtgattgaaatggcgcgggagaatcaaacgacccagaaaggacaaaagaatagccgtgaacggatgaagcggatcgaggaaggcattaaagagctggggtctcaaatcttgaaggaacaccctgtggagaacactcagctccaaaatgaaaaactttacctgtactatttgcagaacggacgcgatatgtacgtggaccaagagttggatattaatcggctgagtgactacgacgttgatcatatcgtcccgcagagcttcctcaaagacgattctattgacaataaggtactgacgcgctctgataaaaaccgtggtaagtcggacaacgtgccctccgaagaggttgtgaaaaagatgaaaaattattggcgccagcttttaaacgcgaagctgatcacacaacgtaaattcgataatttgaccaaggctgaacggggtggcctgagcgagttagataaggcaggatttattaaacgccagttagtggagactcgtcaaatcaccaaacatgtcgcgcagattttggacagccggatgaacaccaagtacgatgaaaatgacaaactgatccgtgaggtgaaagtcattactctgaagtccaaattagttagtgatttccggaaggactttcaattctacaaagtccgtgaaattaataactatcatcacgcacatgacgcgtacctgaatgcagtggttgggaccgcccttatcaagaaatatcctaagctggagtcggagtttgtctatggcgactataaggtatacgatgttcgcaaaatgattgcgaaatctgagcaggagatcggtaaggcaaccgcaaaatatttcttttactcaaacattatgaatttctttaagacagaaatcactctggccaacggggagattcgcaaacgtccgttgatcgaaacaaacggcgagactggcgaaattgtttgggacaaagggcgtgatttcgcgacggtgcgcaaggtactgagcatgcctcaagtcaatattgttaagaaaaccgaagtgcagacgggcgggttttccaaggaaagcatcttacccaaacgtaattcagataaacttattgcacgcaaaaaggactgggatccgaaaaagtatggaggcttcgacagtccaaccgtagcctactctgttctcgttgtagcgaaagtagaaaagggtaaatccaagaaactgaaatctgtcaaggagttgcttggaatcaccattatggagcgtagctccttcgagaagaacccgattgactttctggaagccaaaggatataaagaggtcaagaaagatcttatcattaagctgcctaagtattcactcttcgagctggaaaatggtcgtaaacgcatgctcgcttctgccggcgagttgcagaagggcaatgaattagcacttccatcaaagtacgttaacttcctgtatttggccagccattacgagaaactgaaggggtctccagaggacaacgaacagaaacaattatttgtagagcagcacaagcattatcttgatgaaatcattgagcaaatttccgaattcagtaaacgcgtaatcctggccgatgcaaacctcgacaaggtgctgagcgcttacaataagcatcgcgacaaacctatccgtgagcaggctgaaaatatcattcacctgttcacattaacgaacctgggcgctccggccgcttttaaatatttcgacacgacaatcgaccgtaagcgctataccagtacgaaagaagtgttggatgcgacccttattcaccagtcaattacaggattatatgagacccgtatcgaccttagccaattaggtggggatgcggccacagcccaccggaagagaaagttcagcgacgccttttga

SEQ ID NO: 283 - DNA, 4149 bp, synthetic construct
  source 1..4149: mol_type = other DNA
atggacaaaaagtactctattggcctggatatcgggaccaacagcgtcgggtgggctgttatcaccgacgagtataaagtaccttcgaaaaagttcaaagtgctgggcaacaccgatcgccattcaatcaaaaagaacttgattggtgcgctgttgtttgactccggggaaaccgccgaggcgactcgccttaaacgtacagcacgtcgccggtacactcggcgtaagaatcgcatttgctatttgcaggaaatctttagcaacgagatggcaaaagtcgatgactcgtttttccaccgcctcgaggaaagctttctggtggaggaagacaaaaagcatgagcgtcacccgatcttcggcaacattgtcgatgaagtagcgtatcatgaaaaatacccaaccatttaccacttacgcaaaaagctggtggacagcactgacaaagctgatttgcgccttatctatttagccctggcacatatgattaagtttcgtggtcacttcctgatcgaaggagacttaaatcccgacaacagtgatgttgataaattgtttattcagcttgtccaaacttacaatcaactgttcgaggaaaacccgatcaatgcctccggtgtggatgcaaaagccattttaagtgcacgccttagcaagtcccgtcgcttagaaaaccttatcgcgcagctgcccggcgagaaaaagaatggtttgtttgggaaccttattgccttgagcttaggcctcaccccgaatttcaaaagtaatttcgatcttgcagaagacgccaaattacaactgtcgaaggatacttatgatgacgatctcgataatctgttagcgcagattggtgaccaatacgccgatctttttctggcggctaaaaatctgagcgacgccatcttgctttcggatattctccgcgttaacaccgaaatcacgaaagcgcctcttagtgccagcatgattaaacgttatgatgaacaccaccaggacctgaccttactcaaagcgttggttcgccagcaactgccagagaagtacaaagaaatcttctttgatcagtcaaagaatggttatgccggctatattgacgggggtgcaagccaagaggaattctacaaatttatcaagcctattctggagaaaatggatggcaccgaagagttattggtgaagcttaaccgtgaagacctcctgcggaaacagcgcacattcgataatggttcgatcccacaccaaatccatttgggggagttacacgctattttgcgtcgccaggaagacttttaccctttcctgaaggataaccgggagaaaattgagaagatccttacctttcgtattccgtattacgtaggccccttagcacggggtaatagccgtttcgcgtggatgacacggaagtcggaagagacgatcaccccgtggaacttcgaagaggtagtcgacaagggcgcatcagcgcagtcttttattgaacgtatgacgaatttcgataaaaacttgcccaatgagaaggtgcttccgaaacattccttgttatatgaatattttacagtttacaacgagctgaccaaggttaaatacgtgacggaaggaatgcgcaagcccgcttttcttagcggtgagcaaaaaaaggcgatcgtcgacctgttattcaaaacgaatcgtaaggtgactgtaaagcaactcaaagaagattacttcaaaaagattgagtgcttcgacagcgtcgaaatctctggggtagaggatcggtttaacgcaagtttaggtacctaccatgacctgcttaaaatcattaaggataaagacttcttagataatgaagagaacgaagatattctcgaggacatcgtcttgacgttaaccttatttgaggatcgtgaaatgattgaggaacgcctcaaaacttatgcccacctgttcgacgataaggtgatgaagcagctgaaacgtcggcgctacacaggatggggccgcttgagtcgcaaacttattaacggaatccgtgacaagcaatccggcaaaacgattctggatttcttgaagtcggacggatttgctaatcgcaacttcatgcagttgatccatgatgactccctgacttttaaagaggatattcaaaaggcgcaggttagtggtcaaggcgacagcttacacgaacacatcgcaaatttggctggttcgccggccattaaaaaggggatcctccagaccgtgaaagttgtagatgagcttgttaaggtcatgggtcgtcataagcccgaaaacatcgtgattgaaatggcgcgggagaatcaaacgacccagaaaggacaaaagaatagccgtgaacggatgaagcggatcgaggaaggcattaaagagctggggtctcaaatcttgaaggaacaccctgtggagaacactcagctccaaaatgaaaaactttacctgtactatttgcagaacggacgcgatatgtacgtggaccaagagttggatattaatcggctgagtgactacgacgttgatcatatcgtcccgcagagcttcctcaaagacgattctattgacaataaggtactgacgcgctctgataaaaaccgtggtaagtcggacaacgtgccctccgaagaggttgtgaaaaagatgaaaaattattggcgccagcttttaaacgcgaagctgatcacacaacgtaaattcgataatttgaccaaggctgaacggggtggcctgagcgagttagataaggcaggatttattaaacgccagttagtggagactcgtcaaatcaccaaacatgtcgcgcagattttggacagccggatgaacaccaagtacgatgaaaatgacaaactgatccgtgaggtgaaagtcattactctgaagtccaaattagttagtgatttccggaaggactttcaattctacaaagtccgtgaaattaataactatcatcacgcacatgacgcgtacctgaatgcagtggttgggaccgcccttatcaagaaatatcctaagctggagtcggagtttgtctatggcgactataaggtatacgatgttcgcaaaatgattgcgaaatctgagcaggagatcggtaaggcaaccgcaaaatatttcttttactcaaacattatgaatttctttaagacagaaatcactctggccaacggggagattcgcaaacgtccgttgatcgaaacaaacggcgagactggcgaaattgtttgggacaaagggcgtgatttcgcgacggtgcgcaaggtactgagcatgcctcaagtcaatattgttaagaaaaccgaagtgcagacgggcgggttttccaaggaaagcatcttacccaaacgtaattcagataaacttattgcacgcaaaaaggactgggatccgaaaaagtatggaggcttcgacagtccaaccgtagcctactctgttctcgttgtagcgaaagtagaaaagggtaaatccaagaaactgaaatctgtcaaggagttgcttggaatcaccattatggagcgtagctccttcgagaagaacccgattgactttctggaagccaaaggatataaagaggtcaagaaagatcttatcattaagctgcctaagtattcactcttcgagctggaaaatggtcgtaaacgcatgctcgcttctgccggcgagttgcagaagggcaatgaattagcacttccatcaaagtacgttaacttcctgtatttggccagccattacgagaaactgaaggggtctccagaggacaacgaacagaaacaattatttgtagagcagcacaagcattatcttgatgaaatcattgagcaaatttccgaattcagtaaacgcgtaatcctggccgatgcaaacctcgacaaggtgctgagcgcttacaataagcatcgcgacaaacctatccgtgagcaggctgaaaatatcattcacctgttcacattaacgaacctgggcgctccggccgcttttaaatatttcgacacgacaatcgaccgtaagcgctataccagtacgaaagaagtgttggatgcgacccttattcaccagtcaattacaggattatatgagacccgtatcgaccttagccaattaggtggggatgcggcccgggtgcagcggaaaagaaagtggagcgaggccttctga

SEQ ID NO: 284 - DNA, 4149 bp, synthetic construct
  source 1..4149: mol_type = other DNA
atggacaaaaagtactctattggcctggatatcgggaccaacagcgtcgggtgggctgttatcaccgacgagtataaagtaccttcgaaaaagttcaaagtgctgggcaacaccgatcgccattcaatcaaaaagaacttgattggtgcgctgttgtttgactccggggaaaccgccgaggcgactcgccttaaacgtacagcacgtcgccggtacactcggcgtaagaatcgcatttgctatttgcaggaaatctttagcaacgagatggcaaaagtcgatgactcgtttttccaccgcctcgaggaaagctttctggtggaggaagacaaaaagcatgagcgtcacccgatcttcggcaacattgtcgatgaagtagcgtatcatgaaaaatacccaaccatttaccacttacgcaaaaagctggtggacagcactgacaaagctgatttgcgccttatctatttagccctggcacatatgattaagtttcgtggtcacttcctgatcgaaggagacttaaatcccgacaacagtgatgttgataaattgtttattcagcttgtccaaacttacaatcaactgttcgaggaaaacccgatcaatgcctccggtgtggatgcaaaagccattttaagtgcacgccttagcaagtcccgtcgcttagaaaaccttatcgcgcagctgcccggcgagaaaaagaatggtttgtttgggaaccttattgccttgagcttaggcctcaccccgaatttcaaaagtaatttcgatcttgcagaagacgccaaattacaactgtcgaaggatacttatgatgacgatctcgataatctgttagcgcagattggtgaccaatacgccgatctttttctggcggctaaaaatctgagcgacgccatcttgctttcggatattctccgcgttaacaccgaaatcacgaaagcgcctcttagtgccagcatgattaaacgttatgatgaacaccaccaggacctgaccttactcaaagcgttggttcgccagcaactgccagagaagtacaaagaaatcttctttgatcagtcaaagaatggttatgccggctatattgacgggggtgcaagccaagaggaattctacaaatttatcaagcctattctggagaaaatggatggcaccgaagagttattggtgaagcttaaccgtgaagacctcctgcggaaacagcgcacattcgataatggttcgatcccacaccaaatccatttgggggagttacacgctattttgcgtcgccaggaagacttttaccctttcctgaaggataaccgggagaaaattgagaagatccttacctttcgtattccgtattacgtaggccccttagcacggggtaatagccgtttcgcgtggatgacacggaagtcggaagagacgatcaccccgtggaacttcgaagaggtagtcgacaagggcgcatcagcgcagtcttttattgaacgtatgacgaatttcgataaaaacttgcccaatgagaaggtgcttccgaaacattccttgttatatgaatattttacagtttacaacgagctgaccaaggttaaatacgtgacggaaggaatgcgcaagcccgcttttcttagcggtgagcaaaaaaaggcgatcgtcgacctgttattcaaaacgaatcgtaaggtgactgtaaagcaactcaaagaagattacttcaaaaagattgagtgcttcgacagcgtcgaaatctctggggtagaggatcggtttaacgcaagtttaggtacctaccatgacctgcttaaaatcattaaggataaagacttcttagataatgaagagaacgaagatattctcgaggacatcgtcttgacgttaaccttatttgaggatcgtgaaatgattgaggaacgcctcaaaacttatgcccacctgttcgacgataaggtgatgaagcagctgaaacgtcggcgctacacaggatggggccgcttgagtcgcaaacttattaacggaatccgtgacaagcaatccggcaaaacgattctggatttcttgaagtcggacggatttgctaatcgcaacttcatgcagttgatccatgatgactccctgacttttaaagaggatattcaaaaggcgcaggttagtggtcaaggcgacagcttacacgaacacatcgcaaatttggctggttcgccggccattaaaaaggggatcctccagaccgtgaaagttgtagatgagcttgttaaggtcatgggtcgtcataagcccgaaaacatcgtgattgaaatggcgcgggagaatcaaacgacccagaaaggacaaaagaatagccgtgaacggatgaagcggatcgaggaaggcattaaagagctggggtctcaaatcttgaaggaacaccctgtggagaacactcagctccaaaatgaaaaactttacctgtactatttgcagaacggacgcgatatgtacgtggaccaagagttggatattaatcggctgagtgactacgacgttgatcatatcgtcccgcagagcttcctcaaagacgattctattgacaataaggtactgacgcgctctgataaaaaccgtggtaagtcggacaacgtgccctccgaagaggttgtgaaaaagatgaaaaattattggcgccagcttttaaacgcgaagctgatcacacaacgtaaattcgataatttgaccaaggctgaacggggtggcctgagcgagttagataaggcaggatttattaaacgccagttagtggagactcgtcaaatcaccaaacatgtcgcgcagattttggacagccggatgaacaccaagtacgatgaaaatgacaaactgatccgtgaggtgaaagtcattactctgaagtccaaattagttagtgatttccggaaggactttcaattctacaaagtccgtgaaattaataactatcatcacgcacatgacgcgtacctgaatgcagtggttgggaccgcccttatcaagaaatatcctaagctggagtcggagtttgtctatggcgactataaggtatacgatgttcgcaaaatgattgcgaaatctgagcaggagatcggtaaggcaaccgcaaaatatttcttttactcaaacattatgaatttctttaagacagaaatcactctggccaacggggagattcgcaaacgtccgttgatcgaaacaaacggcgagactggcgaaattgtttgggacaaagggcgtgatttcgcgacggtgcgcaaggtactgagcatgcctcaagtcaatattgttaagaaaaccgaagtgcagacgggcgggttttccaaggaaagcatcttacccaaacgtaattcagataaacttattgcacgcaaaaaggactgggatccgaaaaagtatggaggcttcgacagtccaaccgtagcctactctgttctcgttgtagcgaaagtagaaaagggtaaatccaagaaactgaaatctgtcaaggagttgcttggaatcaccattatggagcgtagctccttcgagaagaacccgattgactttctggaagccaaaggatataaagaggtcaagaaagatcttatcattaagctgcctaagtattcactcttcgagctggaaaatggtcgtaaacgcatgctcgcttctgccggcgagttgcagaagggcaatgaattagcacttccatcaaagtacgttaacttcctgtatttggccagccattacgagaaactgaaggggtctccagaggacaacgaacagaaacaattatttgtagagcagcacaagcattatcttgatgaaatcattgagcaaatttccgaattcagtaaacgcgtaatcctggccgatgcaaacctcgacaaggtgctgagcgcttacaataagcatcgcgacaaacctatccgtgagcaggctgaaaatatcattcacctgttcacattaacgaacctgggcgctccggccgcttttaaatatttcgacacgacaatcgaccgtaagcgctataccagtacgaaagaagtgttggatgcgacccttattcaccagtcaattacaggattatatgagacccgtatcgaccttagccaattaggtggggatgcggcccacagatactgcggcaagcggcggagaagaaccagatga

SEQ ID NO: 285 - DNA, 4149 bp, synthetic construct
  source 1..4149: mol_type = other DNA
atggacaaaaagtactctattggcctggatatcgggaccaacagcgtcgggtgggctgttatcaccgacgagtataaagtaccttcgaaaaagttcaaagtgctgggcaacaccgatcgccattcaatcaaaaagaacttgattggtgcgctgttgtttgactccggggaaaccgccgaggcgactcgccttaaacgtacagcacgtcgccggtacactcggcgtaagaatcgcatttgctatttgcaggaaatctttagcaacgagatggcaaaagtcgatgactcgtttttccaccgcctcgaggaaagctttctggtggaggaagacaaaaagcatgagcgtcacccgatcttcggcaacattgtcgatgaagtagcgtatcatgaaaaatacccaaccatttaccacttacgcaaaaagctggtggacagcactgacaaagctgatttgcgccttatctatttagccctggcacatatgattaagtttcgtggtcacttcctgatcgaaggagacttaaatcccgacaacagtgatgttgataaattgtttattcagcttgtccaaacttacaatcaactgttcgaggaaaacccgatcaatgcctccggtgtggatgcaaaagccattttaagtgcacgccttagcaagtcccgtcgcttagaaaaccttatcgcgcagctgcccggcgagaaaaagaatggtttgtttgggaaccttattgccttgagcttaggcctcaccccgaatttcaaaagtaatttcgatcttgcagaagacgccaaattacaactgtcgaaggatacttatgatgacgatctcgataatctgttagcgcagattggtgaccaatacgccgatctttttctggcggctaaaaatctgagcgacgccatcttgctttcggatattctccgcgttaacaccgaaatcacgaaagcgcctcttagtgccagcatgattaaacgttatgatgaacaccaccaggacctgaccttactcaaagcgttggttcgccagcaactgccagagaagtacaaagaaatcttctttgatcagtcaaagaatggttatgccggctatattgacgggggtgcaagccaagaggaattctacaaatttatcaagcctattctggagaaaatggatggcaccgaagagttattggtgaagcttaaccgtgaagacctcctgcggaaacagcgcacattcgataatggttcgatcccacaccaaatccatttgggggagttacacgctattttgcgtcgccaggaagacttttaccctttcctgaaggataaccgggagaaaattgagaagatccttacctttcgtattccgtattacgtaggccccttagcacggggtaatagccgtttcgcgtggatgacacggaagtcggaagagacgatcaccccgtggaacttcgaagaggtagtcgacaagggcgcatcagcgcagtcttttattgaacgtatgacgaatttcgataaaaacttgcccaatgagaaggtgcttccgaaacattccttgttatatgaatattttacagtttacaacgagctgaccaaggttaaatacgtgacggaaggaatgcgcaagcccgcttttcttagcggtgagcaaaaaaaggcgatcgtcgacctgttattcaaaacgaatcgtaaggtgactgtaaagcaactcaaagaagattacttcaaaaagattgagtgcttcgacagcgtcgaaatctctggggtagaggatcggtttaacgcaagtttaggtacctaccatgacctgcttaaaatcattaaggataaagacttcttagataatgaagagaacgaagatattctcgaggacatcgtcttgacgttaaccttatttgaggatcgtgaaatgattgaggaacgcctcaaaacttatgcccacctgttcgacgataaggtgatgaagcagctgaaacgtcggcgctacacaggatggggccgcttgagtcgcaaacttattaacggaatccgtgacaagcaatccggcaaaacgattctggatttcttgaagtcggacggatttgctaatcgcaacttcatgcagttgatccatgatgactccctgacttttaaagaggatattcaaaaggcgcaggttagtggtcaaggcgacagcttacacgaacacatcgcaaatttggctggttcgccggccattaaaaaggggatcctccagaccgtgaaagttgtagatgagcttgttaaggtcatgggtcgtcataagcccgaaaacatcgtgattgaaatggcgcgggagaatcaaacgacccagaaaggacaaaagaatagccgtgaacggatgaagcggatcgaggaaggcattaaagagctggggtctcaaatcttgaaggaacaccctgtggagaacactcagctccaaaatgaaaaactttacctgtactatttgcagaacggacgcgatatgtacgtggaccaagagttggatattaatcggctgagtgactacgacgttgatcatatcgtcccgcagagcttcctcaaagacgattctattgacaataaggtactgacgcgctctgataaaaaccgtggtaagtcggacaacgtgccctccgaagaggttgtgaaaaagatgaaaaattattggcgccagcttttaaacgcgaagctgatcacacaacgtaaattcgataatttgaccaaggctgaacggggtggcctgagcgagttagataaggcaggatttattaaacgccagttagtggagactcgtcaaatcaccaaacatgtcgcgcagattttggacagccggatgaacaccaagtacgatgaaaatgacaaactgatccgtgaggtgaaagtcattactctgaagtccaaattagttagtgatttccggaaggactttcaattctacaaagtccgtgaaattaataactatcatcacgcacatgacgcgtacctgaatgcagtggttgggaccgcccttatcaagaaatatcctaagctggagtcggagtttgtctatggcgactataaggtatacgatgttcgcaaaatgattgcgaaatctgagcaggagatcggtaaggcaaccgcaaaatatttcttttactcaaacattatgaatttctttaagacagaaatcactctggccaacggggagattcgcaaacgtccgttgatcgaaacaaacggcgagactggcgaaattgtttgggacaaagggcgtgatttcgcgacggtgcgcaaggtactgagcatgcctcaagtcaatattgttaagaaaaccgaagtgcagacgggcgggttttccaaggaaagcatcttacccaaacgtaattcagataaacttattgcacgcaaaaaggactgggatccgaaaaagtatggaggcttcgacagtccaaccgtagcctactctgttctcgttgtagcgaaagtagaaaagggtaaatccaagaaactgaaatctgtcaaggagttgcttggaatcaccattatggagcgtagctccttcgagaagaacccgattgactttctggaagccaaaggatataaagaggtcaagaaagatcttatcattaagctgcctaagtattcactcttcgagctggaaaatggtcgtaaacgcatgctcgcttctgccggcgagttgcagaagggcaatgaattagcacttccatcaaagtacgttaacttcctgtatttggccagccattacgagaaactgaaggggtctccagaggacaacgaacagaaacaattatttgtagagcagcacaagcattatcttgatgaaatcattgagcaaatttccgaattcagtaaacgcgtaatcctggccgatgcaaacctcgacaaggtgctgagcgcttacaataagcatcgcgacaaacctatccgtgagcaggctgaaaatatcattcacctgttcacattaacgaacctgggcgctccggccgcttttaaatatttcgacacgacaatcgaccgtaagcgctataccagtacgaaagaagtgttggatgcgacccttattcaccagtcaattacaggattatatgagacccgtatcgaccttagccaattaggtggggatgcggccacatacagcggcgtgaagcggaagagaaacgtggtgtga

SEQ ID NO: 286 - DNA, 4149 bp, synthetic construct
  source 1..4149: mol_type = other DNA
atggacaaaaagtactctattggcctggatatcgggaccaacagcgtcgggtgggctgttatcaccgacgagtataaagtaccttcgaaaaagttcaaagtgctgggcaacaccgatcgccattcaatcaaaaagaacttgattggtgcgctgttgtttgactccggggaaaccgccgaggcgactcgccttaaacgtacagcacgtcgccggtacactcggcgtaagaatcgcatttgctatttgcaggaaatctttagcaacgagatggcaaaagtcgatgactcgtttttccaccgcctcgaggaaagctttctggtggaggaagacaaaaagcatgagcgtcacccgatcttcggcaacattgtcgatgaagtagcgtatcatgaaaaatacccaaccatttaccacttacgcaaaaagctggtggacagcactgacaaagctgatttgcgccttatctatttagccctggcacatatgattaagtttcgtggtcacttcctgatcgaaggagacttaaatcccgacaacagtgatgttgataaattgtttattcagcttgtccaaacttacaatcaactgttcgaggaaaacccgatcaatgcctccggtgtggatgcaaaagccattttaagtgcacgccttagcaagtcccgtcgcttagaaaaccttatcgcgcagctgcccggcgagaaaaagaatggtttgtttgggaaccttattgccttgagcttaggcctcaccccgaatttcaaaagtaatttcgatcttgcagaagacgccaaattacaactgtcgaaggatacttatgatgacgatctcgataatctgttagcgcagattggtgaccaatacgccgatctttttctggcggctaaaaatctgagcgacgccatcttgctttcggatattctccgcgttaacaccgaaatcacgaaagcgcctcttagtgccagcatgattaaacgttatgatgaacaccaccaggacctgaccttactcaaagcgttggttcgccagcaactgccagagaagtacaaagaaatcttctttgatcagtcaaagaatggttatgccggctatattgacgggggtgcaagccaagaggaattctacaaatttatcaagcctattctggagaaaatggatggcaccgaagagttattggtgaagcttaaccgtgaagacctcctgcggaaacagcgcacattcgataatggttcgatcccacaccaaatccatttgggggagttacacgctattttgcgtcgccaggaagacttttaccctttcctgaaggataaccgggagaaaattgagaagatccttacctttcgtattccgtattacgtaggccccttagcacggggtaatagccgtttcgcgtggatgacacggaagtcggaagagacgatcaccccgtggaacttcgaagaggtagtcgacaagggcgcatcagcgcagtcttttattgaacgtatgacgaatttcgataaaaacttgcccaatgagaaggtgcttccgaaacattccttgttatatgaatattttacagtttacaacgagctgaccaaggttaaatacgtgacggaaggaatgcgcaagcccgcttttcttagcggtgagcaaaaaaaggcgatcgtcgacctgttattcaaaacgaatcgtaaggtgactgtaaagcaactcaaagaagattacttcaaaaagattgagtgcttcgacagcgtcgaaatctctggggtagaggatcggtttaacgcaagtttaggtacctaccatgacctgcttaaaatcattaaggataaagacttcttagataatgaagagaacgaagatattctcgaggacatcgtcttgacgttaaccttatttgaggatcgtgaaatgattgaggaacgcctcaaaacttatgcccacctgttcgacgataaggtgatgaagcagctgaaacgtcggcgctacacaggatggggccgcttgagtcgcaaacttattaacggaatccgtgacaagcaatccggcaaaacgattctggatttcttgaagtcggacggatttgctaatcgcaacttcatgcagttgatccatgatgactccctgacttttaaagaggatattcaaaaggcgcaggttagtggtcaaggcgacagcttacacgaacacatcgcaaatttggctggttcgccggccattaaaaaggggatcctccagaccgtgaaagttgtagatgagcttgttaaggtcatgggtcgtcataagcccgaaaacatcgtgattgaaatggcgcgggagaatcaaacgacccagaaaggacaaaagaatagccgtgaacggatgaagcggatcgaggaaggcattaaagagctggggtctcaaatcttgaaggaacaccctgtggagaacactcagctccaaaatgaaaaactttacctgtactatttgcagaacggacgcgatatgtacgtggaccaagagttggatattaatcggctgagtgactacgacgttgatcatatcgtcccgcagagcttcctcaaagacgattctattgacaataaggtactgacgcgctctgataaaaaccgtggtaagtcggacaacgtgccctccgaagaggttgtgaaaaagatgaaaaattattggcgccagcttttaaacgcgaagctgatcacacaacgtaaattcgataatttgaccaaggctgaacggggtggcctgagcgagttagataaggcaggatttattaaacgccagttagtggagactcgtcaaatcaccaaacatgtcgcgcagattttggacagccggatgaacaccaagtacgatgaaaatgacaaactgatccgtgaggtgaaagtcattactctgaagtccaaattagttagtgatttccggaaggactttcaattctacaaagtccgtgaaattaataactatcatcacgcacatgacgcgtacctgaatgcagtggttgggaccgcccttatcaagaaatatcctaagctggagtcggagtttgtctatggcgactataaggtatacgatgttcgcaaaatgattgcgaaatctgagcaggagatcggtaaggcaaccgcaaaatatttcttttactcaaacattatgaatttctttaagacagaaatcactctggccaacggggagattcgcaaacgtccgttgatcgaaacaaacggcgagactggcgaaattgtttgggacaaagggcgtgatttcgcgacggtgcgcaaggtactgagcatgcctcaagtcaatattgttaagaaaaccgaagtgcagacgggcgggttttccaaggaaagcatcttacccaaacgtaattcagataaacttattgcacgcaaaaaggactgggatccgaaaaagtatggaggcttcgacagtccaaccgtagcctactctgttctcgttgtagcgaaagtagaaaagggtaaatccaagaaactgaaatctgtcaaggagttgcttggaatcaccattatggagcgtagctccttcgagaagaacccgattgactttctggaagccaaaggatataaagaggtcaagaaagatcttatcattaagctgcctaagtattcactcttcgagctggaaaatggtcgtaaacgcatgctcgcttctgccggcgagttgcagaagggcaatgaattagcacttccatcaaagtacgttaacttcctgtatttggccagccattacgagaaactgaaggggtctccagaggacaacgaacagaaacaattatttgtagagcagcacaagcattatcttgatgaaatcattgagcaaatttccgaattcagtaaacgcgtaatcctggccgatgcaaacctcgacaaggtgctgagcgcttacaataagcatcgcgacaaacctatccgtgagcaggctgaaaatatcattcacctgttcacattaacgaacctgggcgctccggccgcttttaaatatttcgacacgacaatcgaccgtaagcgctataccagtacgaaagaagtgttggatgcgacccttattcaccagtcaattacaggattatatgagacccgtatcgaccttagccaattaggtggggatgcggcccggctgaccagaaagcggaagtacgattgcgccttctga

SEQ ID NO: 287 - DNA, 4149 bp, synthetic construct
  source 1..4149: mol_type = other DNA
atggacaaaaagtactctattggcctggatatcgggaccaacagcgtcgggtgggctgttatcaccgacgagtataaagtaccttcgaaaaagttcaaagtgctgggcaacaccgatcgccattcaatcaaaaagaacttgattggtgcgctgttgtttgactccggggaaaccgccgaggcgactcgccttaaacgtacagcacgtcgccggtacactcggcgtaagaatcgcatttgctatttgcaggaaatctttagcaacgagatggcaaaagtcgatgactcgtttttccaccgcctcgaggaaagctttctggtggaggaagacaaaaagcatgagcgtcacccgatcttcggcaacattgtcgatgaagtagcgtatcatgaaaaatacccaaccatttaccacttacgcaaaaagctggtggacagcactgacaaagctgatttgcgccttatctatttagccctggcacatatgattaagtttcgtggtcacttcctgatcgaaggagacttaaatcccgacaacagtgatgttgataaattgtttattcagcttgtccaaacttacaatcaactgttcgaggaaaacccgatcaatgcctccggtgtggatgcaaaagccattttaagtgcacgccttagcaagtcccgtcgcttagaaaaccttatcgcgcagctgcccggcgagaaaaagaatggtttgtttgggaaccttattgccttgagcttaggcctcaccccgaatttcaaaagtaatttcgatcttgcagaagacgccaaattacaactgtcgaaggatacttatgatgacgatctcgataatctgttagcgcagattggtgaccaatacgccgatctttttctggcggctaaaaatctgagcgacgccatcttgctttcggatattctccgcgttaacaccgaaatcacgaaagcgcctcttagtgccagcatgattaaacgttatgatgaacaccaccaggacctgaccttactcaaagcgttggttcgccagcaactgccagagaagtacaaagaaatcttctttgatcagtcaaagaatggttatgccggctatattgacgggggtgcaagccaagaggaattctacaaatttatcaagcctattctggagaaaatggatggcaccgaagagttattggtgaagcttaaccgtgaagacctcctgcggaaacagcgcacattcgataatggttcgatcccacaccaaatccatttgggggagttacacgctattttgcgtcgccaggaagacttttaccctttcctgaaggataaccgggagaaaattgagaagatccttacctttcgtattccgtattacgtaggccccttagcacggggtaatagccgtttcgcgtggatgacacggaagtcggaagagacgatcaccccgtggaacttcgaagaggtagtcgacaagggcgcatcagcgcagtcttttattgaacgtatgacgaatttcgataaaaacttgcccaatgagaaggtgcttccgaaacattccttgttatatgaatattttacagtttacaacgagctgaccaaggttaaatacgtgacggaaggaatgcgcaagcccgcttttcttagcggtgagcaaaaaaaggcgatcgtcgacctgttattcaaaacgaatcgtaaggtgactgtaaagcaactcaaagaagattacttcaaaaagattgagtgcttcgacagcgtcgaaatctctggggtagaggatcggtttaacgcaagtttaggtacctaccatgacctgcttaaaatcattaaggataaagacttcttagataatgaagagaacgaagatattctcgaggacatcgtcttgacgttaaccttatttgaggatcgtgaaatgattgaggaacgcctcaaaacttatgcccacctgttcgacgataaggtgatgaagcagctgaaacgtcggcgctacacaggatggggccgcttgagtcgcaaacttattaacggaatccgtgacaagcaatccggcaaaacgattctggatttcttgaagtcggacggatttgctaatcgcaacttcatgcagttgatccatgatgactccctgacttttaaagaggatattcaaaaggcgcaggttagtggtcaaggcgacagcttacacgaacacatcgcaaatttggctggttcgccggccattaaaaaggggatcctccagaccgtgaaagttgtagatgagcttgttaaggtcatgggtcgtcataagcccgaaaacatcgtgattgaaatggcgcgggagaatcaaacgacccagaaaggacaaaagaatagccgtgaacggatgaagcggatcgaggaaggcattaaagagctggggtctcaaatcttgaaggaacaccctgtggagaacactcagctccaaaatgaaaaactttacctgtactatttgcagaacggacgcgatatgtacgtggaccaagagttggatattaatcggctgagtgactacgacgttgatcatatcgtcccgcagagcttcctcaaagacgattctattgacaataaggtactgacgcgctctgataaaaaccgtggtaagtcggacaacgtgccctccgaagaggttgtgaaaaagatgaaaaattattggcgccagcttttaaacgcgaagctgatcacacaacgtaaattcgataatttgaccaaggctgaacggggtggcctgagcgagttagataaggcaggatttattaaacgccagttagtggagactcgtcaaatcaccaaacatgtcgcgcagattttggacagccggatgaacaccaagtacgatgaaaatgacaaactgatccgtgaggtgaaagtcattactctgaagtccaaattagttagtgatttccggaaggactttcaattctacaaagtccgtgaaattaataactatcatcacgcacatgacgcgtacctgaatgcagtggttgggaccgcccttatcaagaaatatcctaagctggagtcggagtttgtctatggcgactataaggtatacgatgttcgcaaaatgattgcgaaatctgagcaggagatcggtaaggcaaccgcaaaatatttcttttactcaaacattatgaatttctttaagacagaaatcactctggccaacggggagattcgcaaacgtccgttgatcgaaacaaacggcgagactggcgaaattgtttgggacaaagggcgtgatttcgcgacggtgcgcaaggtactgagcatgcctcaagtcaatattgttaagaaaaccgaagtgcagacgggcgggttttccaaggaaagcatcttacccaaacgtaattcagataaacttattgcacgcaaaaaggactgggatccgaaaaagtatggaggcttcgacagtccaaccgtagcctactctgttctcgttgtagcgaaagtagaaaagggtaaatccaagaaactgaaatctgtcaaggagttgcttggaatcaccattatggagcgtagctccttcgagaagaacccgattgactttctggaagccaaaggatataaagaggtcaagaaagatcttatcattaagctgcctaagtattcactcttcgagctggaaaatggtcgtaaacgcatgctcgcttctgccggcgagttgcagaagggcaatgaattagcacttccatcaaagtacgttaacttcctgtatttggccagccattacgagaaactgaaggggtctccagaggacaacgaacagaaacaattatttgtagagcagcacaagcattatcttgatgaaatcattgagcaaatttccgaattcagtaaacgcgtaatcctggccgatgcaaacctcgacaaggtgctgagcgcttacaataagcatcgcgacaaacctatccgtgagcaggctgaaaatatcattcacctgttcacattaacgaacctgggcgctccggccgcttttaaatatttcgacacgacaatcgaccgtaagcgctataccagtacgaaagaagtgttggatgcgacccttattcaccagtcaattacaggattatatgagacccgtatcgaccttagccaattaggtggggatgcggccaagcggaagtacagcatctacctgggcagccagtcttga

SEQ ID NO: 288 - DNA, 4149 bp, synthetic construct
  source 1..4149: mol_type = other DNA
atggacaaaaagtactctattggcctggatatcgggaccaacagcgtcgggtgggctgttatcaccgacgagtataaagtaccttcgaaaaagttcaaagtgctgggcaacaccgatcgccattcaatcaaaaagaacttgattggtgcgctgttgtttgactccggggaaaccgccgaggcgactcgccttaaacgtacagcacgtcgccggtacactcggcgtaagaatcgcatttgctatttgcaggaaatctttagcaacgagatggcaaaagtcgatgactcgtttttccaccgcctcgaggaaagctttctggtggaggaagacaaaaagcatgagcgtcacccgatcttcggcaacattgtcgatgaagtagcgtatcatgaaaaatacccaaccatttaccacttacgcaaaaagctggtggacagcactgacaaagctgatttgcgccttatctatttagccctggcacatatgattaagtttcgtggtcacttcctgatcgaaggagacttaaatcccgacaacagtgatgttgataaattgtttattcagcttgtccaaacttacaatcaactgttcgaggaaaacccgatcaatgcctccggtgtggatgcaaaagccattttaagtgcacgccttagcaagtcccgtcgcttagaaaaccttatcgcgcagctgcccggcgagaaaaagaatggtttgtttgggaaccttattgccttgagcttaggcctcaccccgaatttcaaaagtaatttcgatcttgcagaagacgccaaattacaactgtcgaaggatacttatgatgacgatctcgataatctgttagcgcagattggtgaccaatacgccgatctttttctggcggctaaaaatctgagcgacgccatcttgctttcggatattctccgcgttaacaccgaaatcacgaaagcgcctcttagtgccagcatgattaaacgttatgatgaacaccaccaggacctgaccttactcaaagcgttggttcgccagcaactgccagagaagtacaaagaaatcttctttgatcagtcaaagaatggttatgccggctatattgacgggggtgcaagccaagaggaattctacaaatttatcaagcctattctggagaaaatggatggcaccgaagagttattggtgaagcttaaccgtgaagacctcctgcggaaacagcgcacattcgataatggttcgatcccacaccaaatccatttgggggagttacacgctattttgcgtcgccaggaagacttttaccctttcctgaaggataaccgggagaaaattgagaagatccttacctttcgtattccgtattacgtaggccccttagcacggggtaatagccgtttcgcgtggatgacacggaagtcggaagagacgatcaccccgtggaacttcgaagaggtagtcgacaagggcgcatcagcgcagtcttttattgaacgtatgacgaatttcgataaaaacttgcccaatgagaaggtgcttccgaaacattccttgttatatgaatattttacagtttacaacgagctgaccaaggttaaatacgtgacggaaggaatgcgcaagcccgcttttcttagcggtgagcaaaaaaaggcgatcgtcgacctgttattcaaaacgaatcgtaaggtgactgtaaagcaactcaaagaagattacttcaaaaagattgagtgcttcgacagcgtcgaaatctctggggtagaggatcggtttaacgcaagtttaggtacctaccatgacctgcttaaaatcattaaggataaagacttcttagataatgaagagaacgaagatattctcgaggacatcgtcttgacgttaaccttatttgaggatcgtgaaatgattgaggaacgcctcaaaacttatgcccacctgttcgacgataaggtgatgaagcagctgaaacgtcggcgctacacaggatggggccgcttgagtcgcaaacttattaacggaatccgtgacaagcaatccggcaaaacgattctggatttcttgaagtcggacggatttgctaatcgcaacttcatgcagttgatccatgatgactccctgacttttaaagaggatattcaaaaggcgcaggttagtggtcaaggcgacagcttacacgaacacatcgcaaatttggctggttcgccggccattaaaaaggggatcctccagaccgtgaaagttgtagatgagcttgttaaggtcatgggtcgtcataagcccgaaaacatcgtgattgaaatggcgcgggagaatcaaacgacccagaaaggacaaaagaatagccgtgaacggatgaagcggatcgaggaaggcattaaagagctggggtctcaaatcttgaaggaacaccctgtggagaacactcagctccaaaatgaaaaactttacctgtactatttgcagaacggacgcgatatgtacgtggaccaagagttggatattaatcggctgagtgactacgacgttgatcatatcgtcccgcagagcttcctcaaagacgattctattgacaataaggtactgacgcgctctgataaaaaccgtggtaagtcggacaacgtgccctccgaagaggttgtgaaaaagatgaaaaattattggcgccagcttttaaacgcgaagctgatcacacaacgtaaattcgataatttgaccaaggctgaacggggtggcctgagcgagttagataaggcaggatttattaaacgccagttagtggagactcgtcaaatcaccaaacatgtcgcgcagattttggacagccggatgaacaccaagtacgatgaaaatgacaaactgatccgtgaggtgaaagtcattactctgaagtccaaattagttagtgatttccggaaggactttcaattctacaaagtccgtgaaattaataactatcatcacgcacatgacgcgtacctgaatgcagtggttgggaccgcccttatcaagaaatatcctaagctggagtcggagtttgtctatggcgactataaggtatacgatgttcgcaaaatgattgcgaaatctgagcaggagatcggtaaggcaaccgcaaaatatttcttttactcaaacattatgaatttctttaagacagaaatcactctggccaacggggagattcgcaaacgtccgttgatcgaaacaaacggcgagactggcgaaattgtttgggacaaagggcgtgatttcgcgacggtgcgcaaggtactgagcatgcctcaagtcaatattgttaagaaaaccgaagtgcagacgggcgggttttccaaggaaagcatcttacccaaacgtaattcagataaacttattgcacgcaaaaaggactgggatccgaaaaagtatggaggcttcgacagtccaaccgtagcctactctgttctcgttgtagcgaaagtagaaaagggtaaatccaagaaactgaaatctgtcaaggagttgcttggaatcaccattatggagcgtagctccttcgagaagaacccgattgactttctggaagccaaaggatataaagaggtcaagaaagatcttatcattaagctgcctaagtattcactcttcgagctggaaaatggtcgtaaacgcatgctcgcttctgccggcgagttgcagaagggcaatgaattagcacttccatcaaagtacgttaacttcctgtatttggccagccattacgagaaactgaaggggtctccagaggacaacgaacagaaacaattatttgtagagcagcacaagcattatcttgatgaaatcattgagcaaatttccgaattcagtaaacgcgtaatcctggccgatgcaaacctcgacaaggtgctgagcgcttacaataagcatcgcgacaaacctatccgtgagcaggctgaaaatatcattcacctgttcacattaacgaacctgggcgctccggccgcttttaaatatttcgacacgacaatcgaccgtaagcgctataccagtacgaaagaagtgttggatgcgacccttattcaccagtcaattacaggattatatgagacccgtatcgaccttagccaattaggtggggatgcggccctggtcaaccggaagcggagatactgggaagccttctga

SEQ ID NO: 289 - DNA, 4149 bp, synthetic construct
  source 1..4149: mol_type = other DNA
atggacaaaaagtactctattggcctggatatcgggaccaacagcgtcgggtgggctgttatcaccgacgagtataaagtaccttcgaaaaagttcaaagtgctgggcaacaccgatcgccattcaatcaaaaagaacttgattggtgcgctgttgtttgactccggggaaaccgccgaggcgactcgccttaaacgtacagcacgtcgccggtacactcggcgtaagaatcgcatttgctatttgcaggaaatctttagcaacgagatggcaaaagtcgatgactcgtttttccaccgcctcgaggaaagctttctggtggaggaagacaaaaagcatgagcgtcacccgatcttcggcaacattgtcgatgaagtagcgtatcatgaaaaatacccaaccatttaccacttacgcaaaaagctggtggacagcactgacaaagctgatttgcgccttatctatttagccctggcacatatgattaagtttcgtggtcacttcctgatcgaaggagacttaaatcccgacaacagtgatgttgataaattgtttattcagcttgtccaaacttacaatcaactgttcgaggaaaacccgatcaatgcctccggtgtggatgcaaaagccattttaagtgcacgccttagcaagtcccgtcgcttagaaaaccttatcgcgcagctgcccggcgagaaaaagaatggtttgtttgggaaccttattgccttgagcttaggcctcaccccgaatttcaaaagtaatttcgatcttgcagaagacgccaaattacaactgtcgaaggatacttatgatgacgatctcgataatctgttagcgcagattggtgaccaatacgccgatctttttctggcggctaaaaatctgagcgacgccatcttgctttcggatattctccgcgttaacaccgaaatcacgaaagcgcctcttagtgccagcatgattaaacgttatgatgaacaccaccaggacctgaccttactcaaagcgttggttcgccagcaactgccagagaagtacaaagaaatcttctttgatcagtcaaagaatggttatgccggctatattgacgggggtgcaagccaagaggaattctacaaatttatcaagcctattctggagaaaatggatggcaccgaagagttattggtgaagcttaaccgtgaagacctcctgcggaaacagcgcacattcgataatggttcgatcccacaccaaatccatttgggggagttacacgctattttgcgtcgccaggaagacttttaccctttcctgaaggataaccgggagaaaattgagaagatccttacctttcgtattccgtattacgtaggccccttagcacggggtaatagccgtttcgcgtggatgacacggaagtcggaagagacgatcaccccgtggaacttcgaagaggtagtcgacaagggcgcatcagcgcagtcttttattgaacgtatgacgaatttcgataaaaacttgcccaatgagaaggtgcttccgaaacattccttgttatatgaatattttacagtttacaacgagctgaccaaggttaaatacgtgacggaaggaatgcgcaagcccgcttttcttagcggtgagcaaaaaaaggcgatcgtcgacctgttattcaaaacgaatcgtaaggtgactgtaaagcaactcaaagaagattacttcaaaaagattgagtgcttcgacagcgtcgaaatctctggggtagaggatcggtttaacgcaagtttaggtacctaccatgacctgcttaaaatcattaaggataaagacttcttagataatgaagagaacgaagatattctcgaggacatcgtcttgacgttaaccttatttgaggatcgtgaaatgattgaggaacgcctcaaaacttatgcccacctgttcgacgataaggtgatgaagcagctgaaacgtcggcgctacacaggatggggccgcttgagtcgcaaacttattaacggaatccgtgacaagcaatccggcaaaacgattctggatttcttgaagtcggacggatttgctaatcgcaacttcatgcagttgatccatgatgactccctgacttttaaagaggatattcaaaaggcgcaggttagtggtcaaggcgacagcttacacgaacacatcgcaaatttggctggttcgccggccattaaaaaggggatcctccagaccgtgaaagttgtagatgagcttgttaaggtcatgggtcgtcataagcccgaaaacatcgtgattgaaatggcgcgggagaatcaaacgacccagaaaggacaaaagaatagccgtgaacggatgaagcggatcgaggaaggcattaaagagctggggtctcaaatcttgaaggaacaccctgtggagaacactcagctccaaaatgaaaaactttacctgtactatttgcagaacggacgcgatatgtacgtggaccaagagttggatattaatcggctgagtgactacgacgttgatcatatcgtcccgcagagcttcctcaaagacgattctattgacaataaggtactgacgcgctctgataaaaaccgtggtaagtcggacaacgtgccctccgaagaggttgtgaaaaagatgaaaaattattggcgccagcttttaaacgcgaagctgatcacacaacgtaaattcgataatttgaccaaggctgaacggggtggcctgagcgagttagataaggcaggatttattaaacgccagttagtggagactcgtcaaatcaccaaacatgtcgcgcagattttggacagccggatgaacaccaagtacgatgaaaatgacaaactgatccgtgaggtgaaagtcattactctgaagtccaaattagttagtgatttccggaaggactttcaattctacaaagtccgtgaaattaataactatcatcacgcacatgacgcgtacctgaatgcagtggttgggaccgcccttatcaagaaatatcctaagctggagtcggagtttgtctatggcgactataaggtatacgatgttcgcaaaatgattgcgaaatctgagcaggagatcggtaaggcaaccgcaaaatatttcttttactcaaacattatgaatttctttaagacagaaatcactctggccaacggggagattcgcaaacgtccgttgatcgaaacaaacggcgagactggcgaaattgtttgggacaaagggcgtgatttcgcgacggtgcgcaaggtactgagcatgcctcaagtcaatattgttaagaaaaccgaagtgcagacgggcgggttttccaaggaaagcatcttacccaaacgtaattcagataaacttattgcacgcaaaaaggactgggatccgaaaaagtatggaggcttcgacagtccaaccgtagcctactctgttctcgttgtagcgaaagtagaaaagggtaaatccaagaaactgaaatctgtcaaggagttgcttggaatcaccattatggagcgtagctccttcgagaagaacccgattgactttctggaagccaaaggatataaagaggtcaagaaagatcttatcattaagctgcctaagtattcactcttcgagctggaaaatggtcgtaaacgcatgctcgcttctgccggcgagttgcagaagggcaatgaattagcacttccatcaaagtacgttaacttcctgtatttggccagccattacgagaaactgaaggggtctccagaggacaacgaacagaaacaattatttgtagagcagcacaagcattatcttgatgaaatcattgagcaaatttccgaattcagtaaacgcgtaatcctggccgatgcaaacctcgacaaggtgctgagcgcttacaataagcatcgcgacaaacctatccgtgagcaggctgaaaatatcattcacctgttcacattaacgaacctgggcgctccggccgcttttaaatatttcgacacgacaatcgaccgtaagcgctataccagtacgaaagaagtgttggatgcgacccttattcaccagtcaattacaggattatatgagacccgtatcgaccttagccaattaggtggggatgcggccacccacatcggctacaagagaaagcgggacagcgtgtga

SEQ ID NO: 290 - DNA, 4149 bp, synthetic construct
  source 1..4149: mol_type = other DNA
atggacaaaaagtactctattggcctggatatcgggaccaacagcgtcgggtgggctgttatcaccgacgagtataaagtaccttcgaaaaagttcaaagtgctgggcaacaccgatcgccattcaatcaaaaagaacttgattggtgcgctgttgtttgactccggggaaaccgccgaggcgactcgccttaaacgtacagcacgtcgccggtacactcggcgtaagaatcgcatttgctatttgcaggaaatctttagcaacgagatggcaaaagtcgatgactcgtttttccaccgcctcgaggaaagctttctggtggaggaagacaaaaagcatgagcgtcacccgatcttcggcaacattgtcgatgaagtagcgtatcatgaaaaatacccaaccatttaccacttacgcaaaaagctggtggacagcactgacaaagctgatttgcgccttatctatttagccctggcacatatgattaagtttcgtggtcacttcctgatcgaaggagacttaaatcccgacaacagtgatgttgataaattgtttattcagcttgtccaaacttacaatcaactgttcgaggaaaacccgatcaatgcctccggtgtggatgcaaaagccattttaagtgcacgccttagcaagtcccgtcgcttagaaaaccttatcgcgcagctgcccggcgagaaaaagaatggtttgtttgggaaccttattgccttgagcttaggcctcaccccgaatttcaaaagtaatttcgatcttgcagaagacgccaaattacaactgtcgaaggatacttatgatgacgatctcgataatctgttagcgcagattggtgaccaatacgccgatctttttctggcggctaaaaatctgagcgacgccatcttgctttcggatattctccgcgttaacaccgaaatcacgaaagcgcctcttagtgccagcatgattaaacgttatgatgaacaccaccaggacctgaccttactcaaagcgttggttcgccagcaactgccagagaagtacaaagaaatcttctttgatcagtcaaagaatggttatgccggctatattgacgggggtgcaagccaagaggaattctacaaatttatcaagcctattctggagaaaatggatggcaccgaagagttattggtgaagcttaaccgtgaagacctcctgcggaaacagcgcacattcgataatggttcgatcccacaccaaatccatttgggggagttacacgctattttgcgtcgccaggaagacttttaccctttcctgaaggataaccgggagaaaattgagaagatccttacctttcgtattccgtattacgtaggccccttagcacggggtaatagccgtttcgcgtggatgacacggaagtcggaagagacgatcaccccgtggaacttcgaagaggtagtcgacaagggcgcatcagcgcagtcttttattgaacgtatgacgaatttcgataaaaacttgcccaatgagaaggtgcttccgaaacattccttgttatatgaatattttacagtttacaacgagctgaccaaggttaaatacgtgacggaaggaatgcgcaagcccgcttttcttagcggtgagcaaaaaaaggcgatcgtcgacctgttattcaaaacgaatcgtaaggtgactgtaaagcaactcaaagaagattacttcaaaaagattgagtgcttcgacagcgtcgaaatctctggggtagaggatcggtttaacgcaagtttaggtacctaccatgacctgcttaaaatcattaaggataaagacttcttagataatgaagagaacgaagatattctcgaggacatcgtcttgacgttaaccttatttgaggatcgtgaaatgattgaggaacgcctcaaaacttatgcccacctgttcgacgataaggtgatgaagcagctgaaacgtcggcgctacacaggatggggccgcttgagtcgcaaacttattaacggaatccgtgacaagcaatccggcaaaacgattctggatttcttgaagtcggacggatttgctaatcgcaacttcatgcagttgatccatgatgactccctgacttttaaagaggatattcaaaaggcgcaggttagtggtcaaggcgacagcttacacgaacacatcgcaaatttggctggttcgccggccattaaaaaggggatcctccagaccgtgaaagttgtagatgagcttgttaaggtcatgggtcgtcataagcccgaaaacatcgtgattgaaatggcgcgggagaatcaaacgacccagaaaggacaaaagaatagccgtgaacggatgaagcggatcgaggaaggcattaaagagctggggtctcaaatcttgaaggaacaccctgtggagaacactcagctccaaaatgaaaaactttacctgtactatttgcagaacggacgcgatatgtacgtggaccaagagttggatattaatcggctgagtgactacgacgttgatcatatcgtcccgcagagcttcctcaaagacgattctattgacaataaggtactgacgcgctctgataaaaaccgtggtaagtcggacaacgtgccctccgaagaggttgtgaaaaagatgaaaaattattggcgccagcttttaaacgcgaagctgatcacacaacgtaaattcgataatttgaccaaggctgaacggggtggcctgagcgagttagataaggcaggatttattaaacgccagttagtggagactcgtcaaatcaccaaacatgtcgcgcagattttggacagccggatgaacaccaagtacgatgaaaatgacaaactgatccgtgaggtgaaagtcattactctgaagtccaaattagttagtgatttccggaaggactttcaattctacaaagtccgtgaaattaataactatcatcacgcacatgacgcgtacctgaatgcagtggttgggaccgcccttatcaagaaatatcctaagctggagtcggagtttgtctatggcgactataaggtatacgatgttcgcaaaatgattgcgaaatctgagcaggagatcggtaaggcaaccgcaaaatatttcttttactcaaacattatgaatttctttaagacagaaatcactctggccaacggggagattcgcaaacgtccgttgatcgaaacaaacggcgagactggcgaaattgtttgggacaaagggcgtgatttcgcgacggtgcgcaaggtactgagcatgcctcaagtcaatattgttaagaaaaccgaagtgcagacgggcgggttttccaaggaaagcatcttacccaaacgtaattcagataaacttattgcacgcaaaaaggactgggatccgaaaaagtatggaggcttcgacagtccaaccgtagcctactctgttctcgttgtagcgaaagtagaaaagggtaaatccaagaaactgaaatctgtcaaggagttgcttggaatcaccattatggagcgtagctccttcgagaagaacccgattgactttctggaagccaaaggatataaagaggtcaagaaagatcttatcattaagctgcctaagtattcactcttcgagctggaaaatggtcgtaaacgcatgctcgcttctgccggcgagttgcagaagggcaatgaattagcacttccatcaaagtacgttaacttcctgtatttggccagccattacgagaaactgaaggggtctccagaggacaacgaacagaaacaattatttgtagagcagcacaagcattatcttgatgaaatcattgagcaaatttccgaattcagtaaacgcgtaatcctggccgatgcaaacctcgacaaggtgctgagcgcttacaataagcatcgcgacaaacctatccgtgagcaggctgaaaatatcattcacctgttcacattaacgaacctgggcgctccggccgcttttaaatatttcgacacgacaatcgaccgtaagcgctataccagtacgaaagaagtgttggatgcgacccttattcaccagtcaattacaggattatatgagacccgtatcgaccttagccaattaggtggggatgcggccaagaaaggcaagcggaagagactcgtgcggccttggtga

SEQ ID NO: 291 - DNA, 4149 bp, synthetic construct
  source 1..4149: mol_type = other DNA
atggacaaaaagtactctattggcctggatatcgggaccaacagcgtcgggtgggctgttatcaccgacgagtataaagtaccttcgaaaaagttcaaagtgctgggcaacaccgatcgccattcaatcaaaaagaacttgattggtgcgctgttgtttgactccggggaaaccgccgaggcgactcgccttaaacgtacagcacgtcgccggtacactcggcgtaagaatcgcatttgctatttgcaggaaatctttagcaacgagatggcaaaagtcgatgactcgtttttccaccgcctcgaggaaagctttctggtggaggaagacaaaaagcatgagcgtcacccgatcttcggcaacattgtcgatgaagtagcgtatcatgaaaaatacccaaccatttaccacttacgcaaaaagctggtggacagcactgacaaagctgatttgcgccttatctatttagccctggcacatatgattaagtttcgtggtcacttcctgatcgaaggagacttaaatcccgacaacagtgatgttgataaattgtttattcagcttgtccaaacttacaatcaactgttcgaggaaaacccgatcaatgcctccggtgtggatgcaaaagccattttaagtgcacgccttagcaagtcccgtcgcttagaaaaccttatcgcgcagctgcccggcgagaaaaagaatggtttgtttgggaaccttattgccttgagcttaggcctcaccccgaatttcaaaagtaatttcgatcttgcagaagacgccaaattacaactgtcgaaggatacttatgatgacgatctcgataatctgttagcgcagattggtgaccaatacgccgatctttttctggcggctaaaaatctgagcgacgccatcttgctttcggatattctccgcgttaacaccgaaatcacgaaagcgcctcttagtgccagcatgattaaacgttatgatgaacaccaccaggacctgaccttactcaaagcgttggttcgccagcaactgccagagaagtacaaagaaatcttctttgatcagtcaaagaatggttatgccggctatattgacgggggtgcaagccaagaggaattctacaaatttatcaagcctattctggagaaaatggatggcaccgaagagttattggtgaagcttaaccgtgaagacctcctgcggaaacagcgcacattcgataatggttcgatcccacaccaaatccatttgggggagttacacgctattttgcgtcgccaggaagacttttaccctttcctgaaggataaccgggagaaaattgagaagatccttacctttcgtattccgtattacgtaggccccttagcacggggtaatagccgtttcgcgtggatgacacggaagtcggaagagacgatcaccccgtggaacttcgaagaggtagtcgacaagggcgcatcagcgcagtcttttattgaacgtatgacgaatttcgataaaaacttgcccaatgagaaggtgcttccgaaacattccttgttatatgaatattttacagtttacaacgagctgaccaaggttaaatacgtgacggaaggaatgcgcaagcccgcttttcttagcggtgagcaaaaaaaggcgatcgtcgacctgttattcaaaacgaatcgtaaggtgactgtaaagcaactcaaagaagattacttcaaaaagattgagtgcttcgacagcgtcgaaatctctggggtagaggatcggtttaacgcaagtttaggtacctaccatgacctgcttaaaatcattaaggataaagacttcttagataatgaagagaacgaagatattctcgaggacatcgtcttgacgttaaccttatttgaggatcgtgaaatgattgaggaacgcctcaaaacttatgcccacctgttcgacgataaggtgatgaagcagctgaaacgtcggcgctacacaggatggggccgcttgagtcgcaaacttattaacggaatccgtgacaagcaatccggcaaaacgattctggatttcttgaagtcggacggatttgctaatcgcaacttcatgcagttgatccatgatgactccctgacttttaaagaggatattcaaaaggcgcaggttagtggtcaaggcgacagcttacacgaacacatcgcaaatttggctggttcgccggccattaaaaaggggatcctccagaccgtgaaagttgtagatgagcttgttaaggtcatgggtcgtcataagcccgaaaacatcgtgattgaaatggcgcgggagaatcaaacgacccagaaaggacaaaagaatagccgtgaacggatgaagcggatcgaggaaggcattaaagagctggggtctcaaatcttgaaggaacaccctgtggagaacactcagctccaaaatgaaaaactttacctgtactatttgcagaacggacgcgatatgtacgtggaccaagagttggatattaatcggctgagtgactacgacgttgatcatatcgtcccgcagagcttcctcaaagacgattctattgacaataaggtactgacgcgctctgataaaaaccgtggtaagtcggacaacgtgccctccgaagaggttgtgaaaaagatgaaaaattattggcgccagcttttaaacgcgaagctgatcacacaacgtaaattcgataatttgaccaaggctgaacggggtggcctgagcgagttagataaggcaggatttattaaacgccagttagtggagactcgtcaaatcaccaaacatgtcgcgcagattttggacagccggatgaacaccaagtacgatgaaaatgacaaactgatccgtgaggtgaaagtcattactctgaagtccaaattagttagtgatttccggaaggactttcaattctacaaagtccgtgaaattaataactatcatcacgcacatgacgcgtacctgaatgcagtggttgggaccgcccttatcaagaaatatcctaagctggagtcggagtttgtctatggcgactataaggtatacgatgttcgcaaaatgattgcgaaatctgagcaggagatcggtaaggcaaccgcaaaatatttcttttactcaaacattatgaatttctttaagacagaaatcactctggccaacggggagattcgcaaacgtccgttgatcgaaacaaacggcgagactggcgaaattgtttgggacaaagggcgtgatttcgcgacggtgcgcaaggtactgagcatgcctcaagtcaatattgttaagaaaaccgaagtgcagacgggcgggttttccaaggaaagcatcttacccaaacgtaattcagataaacttattgcacgcaaaaaggactgggatccgaaaaagtatggaggcttcgacagtccaaccgtagcctactctgttctcgttgtagcgaaagtagaaaagggtaaatccaagaaactgaaatctgtcaaggagttgcttggaatcaccattatggagcgtagctccttcgagaagaacccgattgactttctggaagccaaaggatataaagaggtcaagaaagatcttatcattaagctgcctaagtattcactcttcgagctggaaaatggtcgtaaacgcatgctcgcttctgccggcgagttgcagaagggcaatgaattagcacttccatcaaagtacgttaacttcctgtatttggccagccattacgagaaactgaaggggtctccagaggacaacgaacagaaacaattatttgtagagcagcacaagcattatcttgatgaaatcattgagcaaatttccgaattcagtaaacgcgtaatcctggccgatgcaaacctcgacaaggtgctgagcgcttacaataagcatcgcgacaaacctatccgtgagcaggctgaaaatatcattcacctgttcacattaacgaacctgggcgctccggccgcttttaaatatttcgacacgacaatcgaccgtaagcgctataccagtacgaaagaagtgttggatgcgacccttattcaccagtcaattacaggattatatgagacccgtatcgaccttagccaattaggtggggatgcggcctacggcagagtgtccaagaggcccagataccagttctga

SEQ ID NO: 292 - DNA, 4146 bp, synthetic construct
  source 1..4146: mol_type = other DNA
atggacaaaaagtactctattggcctggatatcgggaccaacagcgtcgggtgggctgttatcaccgacgagtataaagtaccttcgaaaaagttcaaagtgctgggcaacaccgatcgccattcaatcaaaaagaacttgattggtgcgctgttgtttgactccggggaaaccgccgaggcgactcgccttaaacgtacagcacgtcgccggtacactcggcgtaagaatcgcatttgctatttgcaggaaatctttagcaacgagatggcaaaagtcgatgactcgtttttccaccgcctcgaggaaagctttctggtggaggaagacaaaaagcatgagcgtcacccgatcttcggcaacattgtcgatgaagtagcgtatcatgaaaaatacccaaccatttaccacttacgcaaaaagctggtggacagcactgacaaagctgatttgcgccttatctatttagccctggcacatatgattaagtttcgtggtcacttcctgatcgaaggagacttaaatcccgacaacagtgatgttgataaattgtttattcagcttgtccaaacttacaatcaactgttcgaggaaaacccgatcaatgcctccggtgtggatgcaaaagccattttaagtgcacgccttagcaagtcccgtcgcttagaaaaccttatcgcgcagctgcccggcgagaaaaagaatggtttgtttgggaaccttattgccttgagcttaggcctcaccccgaatttcaaaagtaatttcgatcttgcagaagacgccaaattacaactgtcgaaggatacttatgatgacgatctcgataatctgttagcgcagattggtgaccaatacgccgatctttttctggcggctaaaaatctgagcgacgccatcttgctttcggatattctccgcgttaacaccgaaatcacgaaagcgcctcttagtgccagcatgattaaacgttatgatgaacaccaccaggacctgaccttactcaaagcgttggttcgccagcaactgccagagaagtacaaagaaatcttctttgatcagtcaaagaatggttatgccggctatattgacgggggtgcaagccaagaggaattctacaaatttatcaagcctattctggagaaaatggatggcaccgaagagttattggtgaagcttaaccgtgaagacctcctgcggaaacagcgcacattcgataatggttcgatcccacaccaaatccatttgggggagttacacgctattttgcgtcgccaggaagacttttaccctttcctgaaggataaccgggagaaaattgagaagatccttacctttcgtattccgtattacgtaggccccttagcacggggtaatagccgtttcgcgtggatgacacggaagtcggaagagacgatcaccccgtggaacttcgaagaggtagtcgacaagggcgcatcagcgcagtcttttattgaacgtatgacgaatttcgataaaaacttgcccaatgagaaggtgcttccgaaacattccttgttatatgaatattttacagtttacaacgagctgaccaaggttaaatacgtgacggaaggaatgcgcaagcccgcttttcttagcggtgagcaaaaaaaggcgatcgtcgacctgttattcaaaacgaatcgtaaggtgactgtaaagcaactcaaagaagattacttcaaaaagattgagtgcttcgacagcgtcgaaatctctggggtagaggatcggtttaacgcaagtttaggtacctaccatgacctgcttaaaatcattaaggataaagacttcttagataatgaagagaacgaagatattctcgaggacatcgtcttgacgttaaccttatttgaggatcgtgaaatgattgaggaacgcctcaaaacttatgcccacctgttcgacgataaggtgatgaagcagctgaaacgtcggcgctacacaggatggggccgcttgagtcgcaaacttattaacggaatccgtgacaagcaatccggcaaaacgattctggatttcttgaagtcggacggatttgctaatcgcaacttcatgcagttgatccatgatgactccctgacttttaaagaggatattcaaaaggcgcaggttagtggtcaaggcgacagcttacacgaacacatcgcaaatttggctggttcgccggccattaaaaaggggatcctccagaccgtgaaagttgtagatgagcttgttaaggtcatgggtcgtcataagcccgaaaacatcgtgattgaaatggcgcgggagaatcaaacgacccagaaaggacaaaagaatagccgtgaacggatgaagcggatcgaggaaggcattaaagagctggggtctcaaatcttgaaggaacaccctgtggagaacactcagctccaaaatgaaaaactttacctgtactatttgcagaacggacgcgatatgtacgtggaccaagagttggatattaatcggctgagtgactacgacgttgatcatatcgtcccgcagagcttcctcaaagacgattctattgacaataaggtactgacgcgctctgataaaaaccgtggtaagtcggacaacgtgccctccgaagaggttgtgaaaaagatgaaaaattattggcgccagcttttaaacgcgaagctgatcacacaacgtaaattcgataatttgaccaaggctgaacggggtggcctgagcgagttagataaggcaggatttattaaacgccagttagtggagactcgtcaaatcaccaaacatgtcgcgcagattttggacagccggatgaacaccaagtacgatgaaaatgacaaactgatccgtgaggtgaaagtcattactctgaagtccaaattagttagtgatttccggaaggactttcaattctacaaagtccgtgaaattaataactatcatcacgcacatgacgcgtacctgaatgcagtggttgggaccgcccttatcaagaaatatcctaagctggagtcggagtttgtctatggcgactataaggtatacgatgttcgcaaaatgattgcgaaatctgagcaggagatcggtaaggcaaccgcaaaatatttcttttactcaaacattatgaatttctttaagacagaaatcactctggccaacggggagattcgcaaacgtccgttgatcgaaacaaacggcgagactggcgaaattgtttgggacaaagggcgtgatttcgcgacggtgcgcaaggtactgagcatgcctcaagtcaatattgttaagaaaaccgaagtgcagacgggcgggttttccaaggaaagcatcttacccaaacgtaattcagataaacttattgcacgcaaaaaggactgggatccgaaaaagtatggaggcttcgacagtccaaccgtagcctactctgttctcgttgtagcgaaagtagaaaagggtaaatccaagaaactgaaatctgtcaaggagttgcttggaatcaccattatggagcgtagctccttcgagaagaacccgattgactttctggaagccaaaggatataaagaggtcaagaaagatcttatcattaagctgcctaagtattcactcttcgagctggaaaatggtcgtaaacgcatgctcgcttctgccggcgagttgcagaagggcaatgaattagcacttccatcaaagtacgttaacttcctgtatttggccagccattacgagaaactgaaggggtctccagaggacaacgaacagaaacaattatttgtagagcagcacaagcattatcttgatgaaatcattgagcaaatttccgaattcagtaaacgcgtaatcctggccgatgcaaacctcgacaaggtgctgagcgcttacaataagcatcgcgacaaacctatccgtgagcaggctgaaaatatcattcacctgttcacattaacgaacctgggcgctccggccgcttttaaatatttcgacacgacaatcgaccgtaagcgctataccagtacgaaagaagtgttggatgcgacccttattcaccagtcaattacaggattatatgagacccgtatcgaccttagccaattaggtggggatgcggcctctgtgctgggcaagagaagcagaacctgggagtga

SEQ ID NO: 293 - DNA, 4149 bp, synthetic construct
  source 1..4149: mol_type = other DNA
atggacaaaaagtactctattggcctggatatcgggaccaacagcgtcgggtgggctgttatcaccgacgagtataaagtaccttcgaaaaagttcaaagtgctgggcaacaccgatcgccattcaatcaaaaagaacttgattggtgcgctgttgtttgactccggggaaaccgccgaggcgactcgccttaaacgtacagcacgtcgccggtacactcggcgtaagaatcgcatttgctatttgcaggaaatctttagcaacgagatggcaaaagtcgatgactcgtttttccaccgcctcgaggaaagctttctggtggaggaagacaaaaagcatgagcgtcacccgatcttcggcaacattgtcgatgaagtagcgtatcatgaaaaatacccaaccatttaccacttacgcaaaaagctggtggacagcactgacaaagctgatttgcgccttatctatttagccctggcacatatgattaagtttcgtggtcacttcctgatcgaaggagacttaaatcccgacaacagtgatgttgataaattgtttattcagcttgtccaaacttacaatcaactgttcgaggaaaacccgatcaatgcctccggtgtggatgcaaaagccattttaagtgcacgccttagcaagtcccgtcgcttagaaaaccttatcgcgcagctgcccggcgagaaaaagaatggtttgtttgggaaccttattgccttgagcttaggcctcaccccgaatttcaaaagtaatttcgatcttgcagaagacgccaaattacaactgtcgaaggatacttatgatgacgatctcgataatctgttagcgcagattggtgaccaatacgccgatctttttctggcggctaaaaatctgagcgacgccatcttgctttcggatattctccgcgttaacaccgaaatcacgaaagcgcctcttagtgccagcatgattaaacgttatgatgaacaccaccaggacctgaccttactcaaagcgttggttcgccagcaactgccagagaagtacaaagaaatcttctttgatcagtcaaagaatggttatgccggctatattgacgggggtgcaagccaagaggaattctacaaatttatcaagcctattctggagaaaatggatggcaccgaagagttattggtgaagcttaaccgtgaagacctcctgcggaaacagcgcacattcgataatggttcgatcccacaccaaatccatttgggggagttacacgctattttgcgtcgccaggaagacttttaccctttcctgaaggataaccgggagaaaattgagaagatccttacctttcgtattccgtattacgtaggccccttagcacggggtaatagccgtttcgcgtggatgacacggaagtcggaagagacgatcaccccgtggaacttcgaagaggtagtcgacaagggcgcatcagcgcagtcttttattgaacgtatgacgaatttcgataaaaacttgcccaatgagaaggtgcttccgaaacattccttgttatatgaatattttacagtttacaacgagctgaccaaggttaaatacgtgacggaaggaatgcgcaagcccgcttttcttagcggtgagcaaaaaaaggcgatcgtcgacctgttattcaaaacgaatcgtaaggtgactgtaaagcaactcaaagaagattacttcaaaaagattgagtgcttcgacagcgtcgaaatctctggggtagaggatcggtttaacgcaagtttaggtacctaccatgacctgcttaaaatcattaaggataaagacttcttagataatgaagagaacgaagatattctcgaggacatcgtcttgacgttaaccttatttgaggatcgtgaaatgattgaggaacgcctcaaaacttatgcccacctgttcgacgataaggtgatgaagcagctgaaacgtcggcgctacacaggatggggccgcttgagtcgcaaacttattaacggaatccgtgacaagcaatccggcaaaacgattctggatttcttgaagtcggacggatttgctaatcgcaacttcatgcagttgatccatgatgactccctgacttttaaagaggatattcaaaaggcgcaggttagtggtcaaggcgacagcttacacgaacacatcgcaaatttggctggttcgccggccattaaaaaggggatcctccagaccgtgaaagttgtagatgagcttgttaaggtcatgggtcgtcataagcccgaaaacatcgtgattgaaatggcgcgggagaatcaaacgacccagaaaggacaaaagaatagccgtgaacggatgaagcggatcgaggaaggcattaaagagctggggtctcaaatcttgaaggaacaccctgtggagaacactcagctccaaaatgaaaaactttacctgtactatttgcagaacggacgcgatatgtacgtggaccaagagttggatattaatcggctgagtgactacgacgttgatcatatcgtcccgcagagcttcctcaaagacgattctattgacaataaggtactgacgcgctctgataaaaaccgtggtaagtcggacaacgtgccctccgaagaggttgtgaaaaagatgaaaaattattggcgccagcttttaaacgcgaagctgatcacacaacgtaaattcgataatttgaccaaggctgaacggggtggcctgagcgagttagataaggcaggatttattaaacgccagttagtggagactcgtcaaatcaccaaacatgtcgcgcagattttggacagccggatgaacaccaagtacgatgaaaatgacaaactgatccgtgaggtgaaagtcattactctgaagtccaaattagttagtgatttccggaaggactttcaattctacaaagtccgtgaaattaataactatcatcacgcacatgacgcgtacctgaatgcagtggttgggaccgcccttatcaagaaatatcctaagctggagtcggagtttgtctatggcgactataaggtatacgatgttcgcaaaatgattgcgaaatctgagcaggagatcggtaaggcaaccgcaaaatatttcttttactcaaacattatgaatttctttaagacagaaatcactctggccaacggggagattcgcaaacgtccgttgatcgaaacaaacggcgagactggcgaaattgtttgggacaaagggcgtgatttcgcgacggtgcgcaaggtactgagcatgcctcaagtcaatattgttaagaaaaccgaagtgcagacgggcgggttttccaaggaaagcatcttacccaaacgtaattcagataaacttattgcacgcaaaaaggactgggatccgaaaaagtatggaggcttcgacagtccaaccgtagcctactctgttctcgttgtagcgaaagtagaaaagggtaaatccaagaaactgaaatctgtcaaggagttgcttggaatcaccattatggagcgtagctccttcgagaagaacccgattgactttctggaagccaaaggatataaagaggtcaagaaagatcttatcattaagctgcctaagtattcactcttcgagctggaaaatggtcgtaaacgcatgctcgcttctgccggcgagttgcagaagggcaatgaattagcacttccatcaaagtacgttaacttcctgtatttggccagccattacgagaaactgaaggggtctccagaggacaacgaacagaaacaattatttgtagagcagcacaagcattatcttgatgaaatcattgagcaaatttccgaattcagtaaacgcgtaatcctggccgatgcaaacctcgacaaggtgctgagcgcttacaataagcatcgcgacaaacctatccgtgagcaggctgaaaatatcattcacctgttcacattaacgaacctgggcgctccggccgcttttaaatatttcgacacgacaatcgaccgtaagcgctataccagtacgaaagaagtgttggatgcgacccttattcaccagtcaattacaggattatatgagacccgtatcgaccttagccaattaggtggggatgcggccaccctggaacggaagagaaaactggccgtgctgtactga

SEQ ID NO: 294 - DNA, 4146 bp, synthetic construct
  source 1..4146: mol_type = other DNA
atggacaaaaagtactctattggcctggatatcgggaccaacagcgtcgggtgggctgttatcaccgacgagtataaagtaccttcgaaaaagttcaaagtgctgggcaacaccgatcgccattcaatcaaaaagaacttgattggtgcgctgttgtttgactccggggaaaccgccgaggcgactcgccttaaacgtacagcacgtcgccggtacactcggcgtaagaatcgcatttgctatttgcaggaaatctttagcaacgagatggcaaaagtcgatgactcgtttttccaccgcctcgaggaaagctttctggtggaggaagacaaaaagcatgagcgtcacccgatcttcggcaacattgtcgatgaagtagcgtatcatgaaaaatacccaaccatttaccacttacgcaaaaagctggtggacagcactgacaaagctgatttgcgccttatctatttagccctggcacatatgattaagtttcgtggtcacttcctgatcgaaggagacttaaatcccgacaacagtgatgttgataaattgtttattcagcttgtccaaacttacaatcaactgttcgaggaaaacccgatcaatgcctccggtgtggatgcaaaagccattttaagtgcacgccttagcaagtcccgtcgcttagaaaaccttatcgcgcagctgcccggcgagaaaaagaatggtttgtttgggaaccttattgccttgagcttaggcctcaccccgaatttcaaaagtaatttcgatcttgcagaagacgccaaattacaactgtcgaaggatacttatgatgacgatctcgataatctgttagcgcagattggtgaccaatacgccgatctttttctggcggctaaaaatctgagcgacgccatcttgctttcggatattctccgcgttaacaccgaaatcacgaaagcgcctcttagtgccagcatgattaaacgttatgatgaacaccaccaggacctgaccttactcaaagcgttggttcgccagcaactgccagagaagtacaaagaaatcttctttgatcagtcaaagaatggttatgccggctatattgacgggggtgcaagccaagaggaattctacaaatttatcaagcctattctggagaaaatggatggcaccgaagagttattggtgaagcttaaccgtgaagacctcctgcggaaacagcgcacattcgataatggttcgatcccacaccaaatccatttgggggagttacacgctattttgcgtcgccaggaagacttttaccctttcctgaaggataaccgggagaaaattgagaagatccttacctttcgtattccgtattacgtaggccccttagcacggggtaatagccgtttcgcgtggatgacacggaagtcggaagagacgatcaccccgtggaacttcgaagaggtagtcgacaagggcgcatcagcgcagtcttttattgaacgtatgacgaatttcgataaaaacttgcccaatgagaaggtgcttccgaaacattccttgttatatgaatattttacagtttacaacgagctgaccaaggttaaatacgtgacggaaggaatgcgcaagcccgcttttcttagcggtgagcaaaaaaaggcgatcgtcgacctgttattcaaaacgaatcgtaaggtgactgtaaagcaactcaaagaagattacttcaaaaagattgagtgcttcgacagcgtcgaaatctctggggtagaggatcggtttaacgcaagtttaggtacctaccatgacctgcttaaaatcattaaggataaagacttcttagataatgaagagaacgaagatattctcgaggacatcgtcttgacgttaaccttatttgaggatcgtgaaatgattgaggaacgcctcaaaacttatgcccacctgttcgacgataaggtgatgaagcagctgaaacgtcggcgctacacaggatggggccgcttgagtcgcaaacttattaacggaatccgtgacaagcaatccggcaaaacgattctggatttcttgaagtcggacggatttgctaatcgcaacttcatgcagttgatccatgatgactccctgacttttaaagaggatattcaaaaggcgcaggttagtggtcaaggcgacagcttacacgaacacatcgcaaatttggctggttcgccggccattaaaaaggggatcctccagaccgtgaaagttgtagatgagcttgttaaggtcatgggtcgtcataagcccgaaaacatcgtgattgaaatggcgcgggagaatcaaacgacccagaaaggacaaaagaatagccgtgaacggatgaagcggatcgaggaaggcattaaagagctggggtctcaaatcttgaaggaacaccctgtggagaacactcagctccaaaatgaaaaactttacctgtactatttgcagaacggacgcgatatgtacgtggaccaagagttggatattaatcggctgagtgactacgacgttgatcatatcgtcccgcagagcttcctcaaagacgattctattgacaataaggtactgacgcgctctgataaaaaccgtggtaagtcggacaacgtgccctccgaagaggttgtgaaaaagatgaaaaattattggcgccagcttttaaacgcgaagctgatcacacaacgtaaattcgataatttgaccaaggctgaacggggtggcctgagcgagttagataaggcaggatttattaaacgccagttagtggagactcgtcaaatcaccaaacatgtcgcgcagattttggacagccggatgaacaccaagtacgatgaaaatgacaaactgatccgtgaggtgaaagtcattactctgaagtccaaattagttagtgatttccggaaggactttcaattctacaaagtccgtgaaattaataactatcatcacgcacatgacgcgtacctgaatgcagtggttgggaccgcccttatcaagaaatatcctaagctggagtcggagtttgtctatggcgactataaggtatacgatgttcgcaaaatgattgcgaaatctgagcaggagatcggtaaggcaaccgcaaaatatttcttttactcaaacattatgaatttctttaagacagaaatcactctggccaacggggagattcgcaaacgtccgttgatcgaaacaaacggcgagactggcgaaattgtttgggacaaagggcgtgatttcgcgacggtgcgcaaggtactgagcatgcctcaagtcaatattgttaagaaaaccgaagtgcagacgggcgggttttccaaggaaagcatcttacccaaacgtaattcagataaacttattgcacgcaaaaaggactgggatccgaaaaagtatggaggcttcgacagtccaaccgtagcctactctgttctcgttgtagcgaaagtagaaaagggtaaatccaagaaactgaaatctgtcaaggagttgcttggaatcaccattatggagcgtagctccttcgagaagaacccgattgactttctggaagccaaaggatataaagaggtcaagaaagatcttatcattaagctgcctaagtattcactcttcgagctggaaaatggtcgtaaacgcatgctcgcttctgccggcgagttgcagaagggcaatgaattagcacttccatcaaagtacgttaacttcctgtatttggccagccattacgagaaactgaaggggtctccagaggacaacgaacagaaacaattatttgtagagcagcacaagcattatcttgatgaaatcattgagcaaatttccgaattcagtaaacgcgtaatcctggccgatgcaaacctcgacaaggtgctgagcgcttacaataagcatcgcgacaaacctatccgtgagcaggctgaaaatatcattcacctgttcacattaacgaacctgggcgctccggccgcttttaaatatttcgacacgacaatcgaccgtaagcgctataccagtacgaaagaagtgttggatgcgacccttattcaccagtcaattacaggattatatgagacccgtatcgaccttagccaattaggtggggatgcggcccggaagagaggccggaagagattcagaagcgtgtga

SEQ ID NO: 295 - DNA, 4149 bp, synthetic construct
  source 1..4149: mol_type = other DNA
atggacaaaaagtactctattggcctggatatcgggaccaacagcgtcgggtgggctgttatcaccgacgagtataaagtaccttcgaaaaagttcaaagtgctgggcaacaccgatcgccattcaatcaaaaagaacttgattggtgcgctgttgtttgactccggggaaaccgccgaggcgactcgccttaaacgtacagcacgtcgccggtacactcggcgtaagaatcgcatttgctatttgcaggaaatctttagcaacgagatggcaaaagtcgatgactcgtttttccaccgcctcgaggaaagctttctggtggaggaagacaaaaagcatgagcgtcacccgatcttcggcaacattgtcgatgaagtagcgtatcatgaaaaatacccaaccatttaccacttacgcaaaaagctggtggacagcactgacaaagctgatttgcgccttatctatttagccctggcacatatgattaagtttcgtggtcacttcctgatcgaaggagacttaaatcccgacaacagtgatgttgataaattgtttattcagcttgtccaaacttacaatcaactgttcgaggaaaacccgatcaatgcctccggtgtggatgcaaaagccattttaagtgcacgccttagcaagtcccgtcgcttagaaaaccttatcgcgcagctgcccggcgagaaaaagaatggtttgtttgggaaccttattgccttgagcttaggcctcaccccgaatttcaaaagtaatttcgatcttgcagaagacgccaaattacaactgtcgaaggatacttatgatgacgatctcgataatctgttagcgcagattggtgaccaatacgccgatctttttctggcggctaaaaatctgagcgacgccatcttgctttcggatattctccgcgttaacaccgaaatcacgaaagcgcctcttagtgccagcatgattaaacgttatgatgaacaccaccaggacctgaccttactcaaagcgttggttcgccagcaactgccagagaagtacaaagaaatcttctttgatcagtcaaagaatggttatgccggctatattgacgggggtgcaagccaagaggaattctacaaatttatcaagcctattctggagaaaatggatggcaccgaagagttattggtgaagcttaaccgtgaagacctcctgcggaaacagcgcacattcgataatggttcgatcccacaccaaatccatttgggggagttacacgctattttgcgtcgccaggaagacttttaccctttcctgaaggataaccgggagaaaattgagaagatccttacctttcgtattccgtattacgtaggccccttagcacggggtaatagccgtttcgcgtggatgacacggaagtcggaagagacgatcaccccgtggaacttcgaagaggtagtcgacaagggcgcatcagcgcagtcttttattgaacgtatgacgaatttcgataaaaacttgcccaatgagaaggtgcttccgaaacattccttgttatatgaatattttacagtttacaacgagctgaccaaggttaaatacgtgacggaaggaatgcgcaagcccgcttttcttagcggtgagcaaaaaaaggcgatcgtcgacctgttattcaaaacgaatcgtaaggtgactgtaaagcaactcaaagaagattacttcaaaaagattgagtgcttcgacagcgtcgaaatctctggggtagaggatcggtttaacgcaagtttaggtacctaccatgacctgcttaaaatcattaaggataaagacttcttagataatgaagagaacgaagatattctcgaggacatcgtcttgacgttaaccttatttgaggatcgtgaaatgattgaggaacgcctcaaaacttatgcccacctgttcgacgataaggtgatgaagcagctgaaacgtcggcgctacacaggatggggccgcttgagtcgcaaacttattaacggaatccgtgacaagcaatccggcaaaacgattctggatttcttgaagtcggacggatttgctaatcgcaacttcatgcagttgatccatgatgactccctgacttttaaagaggatattcaaaaggcgcaggttagtggtcaaggcgacagcttacacgaacacatcgcaaatttggctggttcgccggccattaaaaaggggatcctccagaccgtgaaagttgtagatgagcttgttaaggtcatgggtcgtcataagcccgaaaacatcgtgattgaaatggcgcgggagaatcaaacgacccagaaaggacaaaagaatagccgtgaacggatgaagcggatcgaggaaggcattaaagagctggggtctcaaatcttgaaggaacaccctgtggagaacactcagctccaaaatgaaaaactttacctgtactatttgcagaacggacgcgatatgtacgtggaccaagagttggatattaatcggctgagtgactacgacgttgatcatatcgtcccgcagagcttcctcaaagacgattctattgacaataaggtactgacgcgctctgataaaaaccgtggtaagtcggacaacgtgccctccgaagaggttgtgaaaaagatgaaaaattattggcgccagcttttaaacgcgaagctgatcacacaacgtaaattcgataatttgaccaaggctgaacggggtggcctgagcgagttagataaggcaggatttattaaacgccagttagtggagactcgtcaaatcaccaaacatgtcgcgcagattttggacagccggatgaacaccaagtacgatgaaaatgacaaactgatccgtgaggtgaaagtcattactctgaagtccaaattagttagtgatttccggaaggactttcaattctacaaagtccgtgaaattaataactatcatcacgcacatgacgcgtacctgaatgcagtggttgggaccgcccttatcaagaaatatcctaagctggagtcggagtttgtctatggcgactataaggtatacgatgttcgcaaaatgattgcgaaatctgagcaggagatcggtaaggcaaccgcaaaatatttcttttactcaaacattatgaatttctttaagacagaaatcactctggccaacggggagattcgcaaacgtccgttgatcgaaacaaacggcgagactggcgaaattgtttgggacaaagggcgtgatttcgcgacggtgcgcaaggtactgagcatgcctcaagtcaatattgttaagaaaaccgaagtgcagacgggcgggttttccaaggaaagcatcttacccaaacgtaattcagataaacttattgcacgcaaaaaggactgggatccgaaaaagtatggaggcttcgacagtccaaccgtagcctactctgttctcgttgtagcgaaagtagaaaagggtaaatccaagaaactgaaatctgtcaaggagttgcttggaatcaccattatggagcgtagctccttcgagaagaacccgattgactttctggaagccaaaggatataaagaggtcaagaaagatcttatcattaagctgcctaagtattcactcttcgagctggaaaatggtcgtaaacgcatgctcgcttctgccggcgagttgcagaagggcaatgaattagcacttccatcaaagtacgttaacttcctgtatttggccagccattacgagaaactgaaggggtctccagaggacaacgaacagaaacaattatttgtagagcagcacaagcattatcttgatgaaatcattgagcaaatttccgaattcagtaaacgcgtaatcctggccgatgcaaacctcgacaaggtgctgagcgcttacaataagcatcgcgacaaacctatccgtgagcaggctgaaaatatcattcacctgttcacattaacgaacctgggcgctccggccgcttttaaatatttcgacacgacaatcgaccgtaagcgctataccagtacgaaagaagtgttggatgcgacccttattcaccagtcaattacaggattatatgagacccgtatcgaccttagccaattaggtggggatgcggcccagagaaggctgctgaagagaaagagaggcagcctgtga

SEQ ID NO: 296 - DNA, 4149 bp, synthetic construct
  source 1..4149: mol_type = other DNA
atggacaaaaagtactctattggcctggatatcgggaccaacagcgtcgggtgggctgttatcaccgacgagtataaagtaccttcgaaaaagttcaaagtgctgggcaacaccgatcgccattcaatcaaaaagaacttgattggtgcgctgttgtttgactccggggaaaccgccgaggcgactcgccttaaacgtacagcacgtcgccggtacactcggcgtaagaatcgcatttgctatttgcaggaaatctttagcaacgagatggcaaaagtcgatgactcgtttttccaccgcctcgaggaaagctttctggtggaggaagacaaaaagcatgagcgtcacccgatcttcggcaacattgtcgatgaagtagcgtatcatgaaaaatacccaaccatttaccacttacgcaaaaagctggtggacagcactgacaaagctgatttgcgccttatctatttagccctggcacatatgattaagtttcgtggtcacttcctgatcgaaggagacttaaatcccgacaacagtgatgttgataaattgtttattcagcttgtccaaacttacaatcaactgttcgaggaaaacccgatcaatgcctccggtgtggatgcaaaagccattttaagtgcacgccttagcaagtcccgtcgcttagaaaaccttatcgcgcagctgcccggcgagaaaaagaatggtttgtttgggaaccttattgccttgagcttaggcctcaccccgaatttcaaaagtaatttcgatcttgcagaagacgccaaattacaactgtcgaaggatacttatgatgacgatctcgataatctgttagcgcagattggtgaccaatacgccgatctttttctggcggctaaaaatctgagcgacgccatcttgctttcggatattctccgcgttaacaccgaaatcacgaaagcgcctcttagtgccagcatgattaaacgttatgatgaacaccaccaggacctgaccttactcaaagcgttggttcgccagcaactgccagagaagtacaaagaaatcttctttgatcagtcaaagaatggttatgccggctatattgacgggggtgcaagccaagaggaattctacaaatttatcaagcctattctggagaaaatggatggcaccgaagagttattggtgaagcttaaccgtgaagacctcctgcggaaacagcgcacattcgataatggttcgatcccacaccaaatccatttgggggagttacacgctattttgcgtcgccaggaagacttttaccctttcctgaaggataaccgggagaaaattgagaagatccttacctttcgtattccgtattacgtaggccccttagcacggggtaatagccgtttcgcgtggatgacacggaagtcggaagagacgatcaccccgtggaacttcgaagaggtagtcgacaagggcgcatcagcgcagtcttttattgaacgtatgacgaatttcgataaaaacttgcccaatgagaaggtgcttccgaaacattccttgttatatgaatattttacagtttacaacgagctgaccaaggttaaatacgtgacggaaggaatgcgcaagcccgcttttcttagcggtgagcaaaaaaaggcgatcgtcgacctgttattcaaaacgaatcgtaaggtgactgtaaagcaactcaaagaagattacttcaaaaagattgagtgcttcgacagcgtcgaaatctctggggtagaggatcggtttaacgcaagtttaggtacctaccatgacctgcttaaaatcattaaggataaagacttcttagataatgaagagaacgaagatattctcgaggacatcgtcttgacgttaaccttatttgaggatcgtgaaatgattgaggaacgcctcaaaacttatgcccacctgttcgacgataaggtgatgaagcagctgaaacgtcggcgctacacaggatggggccgcttgagtcgcaaacttattaacggaatccgtgacaagcaatccggcaaaacgattctggatttcttgaagtcggacggatttgctaatcgcaacttcatgcagttgatccatgatgactccctgacttttaaagaggatattcaaaaggcgcaggttagtggtcaaggcgacagcttacacgaacacatcgcaaatttggctggttcgccggccattaaaaaggggatcctccagaccgtgaaagttgtagatgagcttgttaaggtcatgggtcgtcataagcccgaaaacatcgtgattgaaatggcgcgggagaatcaaacgacccagaaaggacaaaagaatagccgtgaacggatgaagcggatcgaggaaggcattaaagagctggggtctcaaatcttgaaggaacaccctgtggagaacactcagctccaaaatgaaaaactttacctgtactatttgcagaacggacgcgatatgtacgtggaccaagagttggatattaatcggctgagtgactacgacgttgatcatatcgtcccgcagagcttcctcaaagacgattctattgacaataaggtactgacgcgctctgataaaaaccgtggtaagtcggacaacgtgccctccgaagaggttgtgaaaaagatgaaaaattattggcgccagcttttaaacgcgaagctgatcacacaacgtaaattcgataatttgaccaaggctgaacggggtggcctgagcgagttagataaggcaggatttattaaacgccagttagtggagactcgtcaaatcaccaaacatgtcgcgcagattttggacagccggatgaacaccaagtacgatgaaaatgacaaactgatccgtgaggtgaaagtcattactctgaagtccaaattagttagtgatttccggaaggactttcaattctacaaagtccgtgaaattaataactatcatcacgcacatgacgcgtacctgaatgcagtggttgggaccgcccttatcaagaaatatcctaagctggagtcggagtttgtctatggcgactataaggtatacgatgttcgcaaaatgattgcgaaatctgagcaggagatcggtaaggcaaccgcaaaatatttcttttactcaaacattatgaatttctttaagacagaaatcactctggccaacggggagattcgcaaacgtccgttgatcgaaacaaacggcgagactggcgaaattgtttgggacaaagggcgtgatttcgcgacggtgcgcaaggtactgagcatgcctcaagtcaatattgttaagaaaaccgaagtgcagacgggcgggttttccaaggaaagcatcttacccaaacgtaattcagataaacttattgcacgcaaaaaggactgggatccgaaaaagtatggaggcttcgacagtccaaccgtagcctactctgttctcgttgtagcgaaagtagaaaagggtaaatccaagaaactgaaatctgtcaaggagttgcttggaatcaccattatggagcgtagctccttcgagaagaacccgattgactttctggaagccaaaggatataaagaggtcaagaaagatcttatcattaagctgcctaagtattcactcttcgagctggaaaatggtcgtaaacgcatgctcgcttctgccggcgagttgcagaagggcaatgaattagcacttccatcaaagtacgttaacttcctgtatttggccagccattacgagaaactgaaggggtctccagaggacaacgaacagaaacaattatttgtagagcagcacaagcattatcttgatgaaatcattgagcaaatttccgaattcagtaaacgcgtaatcctggccgatgcaaacctcgacaaggtgctgagcgcttacaataagcatcgcgacaaacctatccgtgagcaggctgaaaatatcattcacctgttcacattaacgaacctgggcgctccggccgcttttaaatatttcgacacgacaatcgaccgtaagcgctataccagtacgaaagaagtgttggatgcgacccttattcaccagtcaattacaggattatatgagacccgtatcgaccttagccaattaggtggggatgcggccatcggcagaaagcggggctactctgtggcctttggatga

SEQ ID NO: 297 - DNA, 4149 bp, synthetic construct
  source 1..4149: mol_type = other DNA
atggacaaaaagtactctattggcctggatatcgggaccaacagcgtcgggtgggctgttatcaccgacgagtataaagtaccttcgaaaaagttcaaagtgctgggcaacaccgatcgccattcaatcaaaaagaacttgattggtgcgctgttgtttgactccggggaaaccgccgaggcgactcgccttaaacgtacagcacgtcgccggtacactcggcgtaagaatcgcatttgctatttgcaggaaatctttagcaacgagatggcaaaagtcgatgactcgtttttccaccgcctcgaggaaagctttctggtggaggaagacaaaaagcatgagcgtcacccgatcttcggcaacattgtcgatgaagtagcgtatcatgaaaaatacccaaccatttaccacttacgcaaaaagctggtggacagcactgacaaagctgatttgcgccttatctatttagccctggcacatatgattaagtttcgtggtcacttcctgatcgaaggagacttaaatcccgacaacagtgatgttgataaattgtttattcagcttgtccaaacttacaatcaactgttcgaggaaaacccgatcaatgcctccggtgtggatgcaaaagccattttaagtgcacgccttagcaagtcccgtcgcttagaaaaccttatcgcgcagctgcccggcgagaaaaagaatggtttgtttgggaaccttattgccttgagcttaggcctcaccccgaatttcaaaagtaatttcgatcttgcagaagacgccaaattacaactgtcgaaggatacttatgatgacgatctcgataatctgttagcgcagattggtgaccaatacgccgatctttttctggcggctaaaaatctgagcgacgccatcttgctttcggatattctccgcgttaacaccgaaatcacgaaagcgcctcttagtgccagcatgattaaacgttatgatgaacaccaccaggacctgaccttactcaaagcgttggttcgccagcaactgccagagaagtacaaagaaatcttctttgatcagtcaaagaatggttatgccggctatattgacgggggtgcaagccaagaggaattctacaaatttatcaagcctattctggagaaaatggatggcaccgaagagttattggtgaagcttaaccgtgaagacctcctgcggaaacagcgcacattcgataatggttcgatcccacaccaaatccatttgggggagttacacgctattttgcgtcgccaggaagacttttaccctttcctgaaggataaccgggagaaaattgagaagatccttacctttcgtattccgtattacgtaggccccttagcacggggtaatagccgtttcgcgtggatgacacggaagtcggaagagacgatcaccccgtggaacttcgaagaggtagtcgacaagggcgcatcagcgcagtcttttattgaacgtatgacgaatttcgataaaaacttgcccaatgagaaggtgcttccgaaacattccttgttatatgaatattttacagtttacaacgagctgaccaaggttaaatacgtgacggaaggaatgcgcaagcccgcttttcttagcggtgagcaaaaaaaggcgatcgtcgacctgttattcaaaacgaatcgtaaggtgactgtaaagcaactcaaagaagattacttcaaaaagattgagtgcttcgacagcgtcgaaatctctggggtagaggatcggtttaacgcaagtttaggtacctaccatgacctgcttaaaatcattaaggataaagacttcttagataatgaagagaacgaagatattctcgaggacatcgtcttgacgttaaccttatttgaggatcgtgaaatgattgaggaacgcctcaaaacttatgcccacctgttcgacgataaggtgatgaagcagctgaaacgtcggcgctacacaggatggggccgcttgagtcgcaaacttattaacggaatccgtgacaagcaatccggcaaaacgattctggatttcttgaagtcggacggatttgctaatcgcaacttcatgcagttgatccatgatgactccctgacttttaaagaggatattcaaaaggcgcaggttagtggtcaaggcgacagcttacacgaacacatcgcaaatttggctggttcgccggccattaaaaaggggatcctccagaccgtgaaagttgtagatgagcttgttaaggtcatgggtcgtcataagcccgaaaacatcgtgattgaaatggcgcgggagaatcaaacgacccagaaaggacaaaagaatagccgtgaacggatgaagcggatcgaggaaggcattaaagagctggggtctcaaatcttgaaggaacaccctgtggagaacactcagctccaaaatgaaaaactttacctgtactatttgcagaacggacgcgatatgtacgtggaccaagagttggatattaatcggctgagtgactacgacgttgatcatatcgtcccgcagagcttcctcaaagacgattctattgacaataaggtactgacgcgctctgataaaaaccgtggtaagtcggacaacgtgccctccgaagaggttgtgaaaaagatgaaaaattattggcgccagcttttaaacgcgaagctgatcacacaacgtaaattcgataatttgaccaaggctgaacggggtggcctgagcgagttagataaggcaggatttattaaacgccagttagtggagactcgtcaaatcaccaaacatgtcgcgcagattttggacagccggatgaacaccaagtacgatgaaaatgacaaactgatccgtgaggtgaaagtcattactctgaagtccaaattagttagtgatttccggaaggactttcaattctacaaagtccgtgaaattaataactatcatcacgcacatgacgcgtacctgaatgcagtggttgggaccgcccttatcaagaaatatcctaagctggagtcggagtttgtctatggcgactataaggtatacgatgttcgcaaaatgattgcgaaatctgagcaggagatcggtaaggcaaccgcaaaatatttcttttactcaaacattatgaatttctttaagacagaaatcactctggccaacggggagattcgcaaacgtccgttgatcgaaacaaacggcgagactggcgaaattgtttgggacaaagggcgtgatttcgcgacggtgcgcaaggtactgagcatgcctcaagtcaatattgttaagaaaaccgaagtgcagacgggcgggttttccaaggaaagcatcttacccaaacgtaattcagataaacttattgcacgcaaaaaggactgggatccgaaaaagtatggaggcttcgacagtccaaccgtagcctactctgttctcgttgtagcgaaagtagaaaagggtaaatccaagaaactgaaatctgtcaaggagttgcttggaatcaccattatggagcgtagctccttcgagaagaacccgattgactttctggaagccaaaggatataaagaggtcaagaaagatcttatcattaagctgcctaagtattcactcttcgagctggaaaatggtcgtaaacgcatgctcgcttctgccggcgagttgcagaagggcaatgaattagcacttccatcaaagtacgttaacttcctgtatttggccagccattacgagaaactgaaggggtctccagaggacaacgaacagaaacaattatttgtagagcagcacaagcattatcttgatgaaatcattgagcaaatttccgaattcagtaaacgcgtaatcctggccgatgcaaacctcgacaaggtgctgagcgcttacaataagcatcgcgacaaacctatccgtgagcaggctgaaaatatcattcacctgttcacattaacgaacctgggcgctccggccgcttttaaatatttcgacacgacaatcgaccgtaagcgctataccagtacgaaagaagtgttggatgcgacccttattcaccagtcaattacaggattatatgagacccgtatcgaccttagccaattaggtggggatgcggccaagcggccctactctatcgcctttccactgggacaatga

SEQ ID NO: 298 - DNA, 4149 bp, synthetic construct
  source 1..4149: mol_type = other DNA
atggacaaaaagtactctattggcctggatatcgggaccaacagcgtcgggtgggctgttatcaccgacgagtataaagtaccttcgaaaaagttcaaagtgctgggcaacaccgatcgccattcaatcaaaaagaacttgattggtgcgctgttgtttgactccggggaaaccgccgaggcgactcgccttaaacgtacagcacgtcgccggtacactcggcgtaagaatcgcatttgctatttgcaggaaatctttagcaacgagatggcaaaagtcgatgactcgtttttccaccgcctcgaggaaagctttctggtggaggaagacaaaaagcatgagcgtcacccgatcttcggcaacattgtcgatgaagtagcgtatcatgaaaaatacccaaccatttaccacttacgcaaaaagctggtggacagcactgacaaagctgatttgcgccttatctatttagccctggcacatatgattaagtttcgtggtcacttcctgatcgaaggagacttaaatcccgacaacagtgatgttgataaattgtttattcagcttgtccaaacttacaatcaactgttcgaggaaaacccgatcaatgcctccggtgtggatgcaaaagccattttaagtgcacgccttagcaagtcccgtcgcttagaaaaccttatcgcgcagctgcccggcgagaaaaagaatggtttgtttgggaaccttattgccttgagcttaggcctcaccccgaatttcaaaagtaatttcgatcttgcagaagacgccaaattacaactgtcgaaggatacttatgatgacgatctcgataatctgttagcgcagattggtgaccaatacgccgatctttttctggcggctaaaaatctgagcgacgccatcttgctttcggatattctccgcgttaacaccgaaatcacgaaagcgcctcttagtgccagcatgattaaacgttatgatgaacaccaccaggacctgaccttactcaaagcgttggttcgccagcaactgccagagaagtacaaagaaatcttctttgatcagtcaaagaatggttatgccggctatattgacgggggtgcaagccaagaggaattctacaaatttatcaagcctattctggagaaaatggatggcaccgaagagttattggtgaagcttaaccgtgaagacctcctgcggaaacagcgcacattcgataatggttcgatcccacaccaaatccatttgggggagttacacgctattttgcgtcgccaggaagacttttaccctttcctgaaggataaccgggagaaaattgagaagatccttacctttcgtattccgtattacgtaggccccttagcacggggtaatagccgtttcgcgtggatgacacggaagtcggaagagacgatcaccccgtggaacttcgaagaggtagtcgacaagggcgcatcagcgcagtcttttattgaacgtatgacgaatttcgataaaaacttgcccaatgagaaggtgcttccgaaacattccttgttatatgaatattttacagtttacaacgagctgaccaaggttaaatacgtgacggaaggaatgcgcaagcccgcttttcttagcggtgagcaaaaaaaggcgatcgtcgacctgttattcaaaacgaatcgtaaggtgactgtaaagcaactcaaagaagattacttcaaaaagattgagtgcttcgacagcgtcgaaatctctggggtagaggatcggtttaacgcaagtttaggtacctaccatgacctgcttaaaatcattaaggataaagacttcttagataatgaagagaacgaagatattctcgaggacatcgtcttgacgttaaccttatttgaggatcgtgaaatgattgaggaacgcctcaaaacttatgcccacctgttcgacgataaggtgatgaagcagctgaaacgtcggcgctacacaggatggggccgcttgagtcgcaaacttattaacggaatccgtgacaagcaatccggcaaaacgattctggatttcttgaagtcggacggatttgctaatcgcaacttcatgcagttgatccatgatgactccctgacttttaaagaggatattcaaaaggcgcaggttagtggtcaaggcgacagcttacacgaacacatcgcaaatttggctggttcgccggccattaaaaaggggatcctccagaccgtgaaagttgtagatgagcttgttaaggtcatgggtcgtcataagcccgaaaacatcgtgattgaaatggcgcgggagaatcaaacgacccagaaaggacaaaagaatagccgtgaacggatgaagcggatcgaggaaggcattaaagagctggggtctcaaatcttgaaggaacaccctgtggagaacactcagctccaaaatgaaaaactttacctgtactatttgcagaacggacgcgatatgtacgtggaccaagagttggatattaatcggctgagtgactacgacgttgatcatatcgtcccgcagagcttcctcaaagacgattctattgacaataaggtactgacgcgctctgataaaaaccgtggtaagtcggacaacgtgccctccgaagaggttgtgaaaaagatgaaaaattattggcgccagcttttaaacgcgaagctgatcacacaacgtaaattcgataatttgaccaaggctgaacggggtggcctgagcgagttagataaggcaggatttattaaacgccagttagtggagactcgtcaaatcaccaaacatgtcgcgcagattttggacagccggatgaacaccaagtacgatgaaaatgacaaactgatccgtgaggtgaaagtcattactctgaagtccaaattagttagtgatttccggaaggactttcaattctacaaagtccgtgaaattaataactatcatcacgcacatgacgcgtacctgaatgcagtggttgggaccgcccttatcaagaaatatcctaagctggagtcggagtttgtctatggcgactataaggtatacgatgttcgcaaaatgattgcgaaatctgagcaggagatcggtaaggcaaccgcaaaatatttcttttactcaaacattatgaatttctttaagacagaaatcactctggccaacggggagattcgcaaacgtccgttgatcgaaacaaacggcgagactggcgaaattgtttgggacaaagggcgtgatttcgcgacggtgcgcaaggtactgagcatgcctcaagtcaatattgttaagaaaaccgaagtgcagacgggcgggttttccaaggaaagcatcttacccaaacgtaattcagataaacttattgcacgcaaaaaggactgggatccgaaaaagtatggaggcttcgacagtccaaccgtagcctactctgttctcgttgtagcgaaagtagaaaagggtaaatccaagaaactgaaatctgtcaaggagttgcttggaatcaccattatggagcgtagctccttcgagaagaacccgattgactttctggaagccaaaggatataaagaggtcaagaaagatcttatcattaagctgcctaagtattcactcttcgagctggaaaatggtcgtaaacgcatgctcgcttctgccggcgagttgcagaagggcaatgaattagcacttccatcaaagtacgttaacttcctgtatttggccagccattacgagaaactgaaggggtctccagaggacaacgaacagaaacaattatttgtagagcagcacaagcattatcttgatgaaatcattgagcaaatttccgaattcagtaaacgcgtaatcctggccgatgcaaacctcgacaaggtgctgagcgcttacaataagcatcgcgacaaacctatccgtgagcaggctgaaaatatcattcacctgttcacattaacgaacctgggcgctccggccgcttttaaatatttcgacacgacaatcgaccgtaagcgctataccagtacgaaagaagtgttggatgcgacccttattcaccagtcaattacaggattatatgagacccgtatcgaccttagccaattaggtggggatgcggccatcacccggaagagaaagcgcgacctggtgttcacatga

SEQ ID NO: 299 - DNA, 4143 bp, synthetic construct
  source 1..4143: mol_type = other DNA
atggacaaaaagtactctattggcctggatatcgggaccaacagcgtcgggtgggctgttatcaccgacgagtataaagtaccttcgaaaaagttcaaagtgctgggcaacaccgatcgccattcaatcaaaaagaacttgattggtgcgctgttgtttgactccggggaaaccgccgaggcgactcgccttaaacgtacagcacgtcgccggtacactcggcgtaagaatcgcatttgctatttgcaggaaatctttagcaacgagatggcaaaagtcgatgactcgtttttccaccgcctcgaggaaagctttctggtggaggaagacaaaaagcatgagcgtcacccgatcttcggcaacattgtcgatgaagtagcgtatcatgaaaaatacccaaccatttaccacttacgcaaaaagctggtggacagcactgacaaagctgatttgcgccttatctatttagccctggcacatatgattaagtttcgtggtcacttcctgatcgaaggagacttaaatcccgacaacagtgatgttgataaattgtttattcagcttgtccaaacttacaatcaactgttcgaggaaaacccgatcaatgcctccggtgtggatgcaaaagccattttaagtgcacgccttagcaagtcccgtcgcttagaaaaccttatcgcgcagctgcccggcgagaaaaagaatggtttgtttgggaaccttattgccttgagcttaggcctcaccccgaatttcaaaagtaatttcgatcttgcagaagacgccaaattacaactgtcgaaggatacttatgatgacgatctcgataatctgttagcgcagattggtgaccaatacgccgatctttttctggcggctaaaaatctgagcgacgccatcttgctttcggatattctccgcgttaacaccgaaatcacgaaagcgcctcttagtgccagcatgattaaacgttatgatgaacaccaccaggacctgaccttactcaaagcgttggttcgccagcaactgccagagaagtacaaagaaatcttctttgatcagtcaaagaatggttatgccggctatattgacgggggtgcaagccaagaggaattctacaaatttatcaagcctattctggagaaaatggatggcaccgaagagttattggtgaagcttaaccgtgaagacctcctgcggaaacagcgcacattcgataatggttcgatcccacaccaaatccatttgggggagttacacgctattttgcgtcgccaggaagacttttaccctttcctgaaggataaccgggagaaaattgagaagatccttacctttcgtattccgtattacgtaggccccttagcacggggtaatagccgtttcgcgtggatgacacggaagtcggaagagacgatcaccccgtggaacttcgaagaggtagtcgacaagggcgcatcagcgcagtcttttattgaacgtatgacgaatttcgataaaaacttgcccaatgagaaggtgcttccgaaacattccttgttatatgaatattttacagtttacaacgagctgaccaaggttaaatacgtgacggaaggaatgcgcaagcccgcttttcttagcggtgagcaaaaaaaggcgatcgtcgacctgttattcaaaacgaatcgtaaggtgactgtaaagcaactcaaagaagattacttcaaaaagattgagtgcttcgacagcgtcgaaatctctggggtagaggatcggtttaacgcaagtttaggtacctaccatgacctgcttaaaatcattaaggataaagacttcttagataatgaagagaacgaagatattctcgaggacatcgtcttgacgttaaccttatttgaggatcgtgaaatgattgaggaacgcctcaaaacttatgcccacctgttcgacgataaggtgatgaagcagctgaaacgtcggcgctacacaggatggggccgcttgagtcgcaaacttattaacggaatccgtgacaagcaatccggcaaaacgattctggatttcttgaagtcggacggatttgctaatcgcaacttcatgcagttgatccatgatgactccctgacttttaaagaggatattcaaaaggcgcaggttagtggtcaaggcgacagcttacacgaacacatcgcaaatttggctggttcgccggccattaaaaaggggatcctccagaccgtgaaagttgtagatgagcttgttaaggtcatgggtcgtcataagcccgaaaacatcgtgattgaaatggcgcgggagaatcaaacgacccagaaaggacaaaagaatagccgtgaacggatgaagcggatcgaggaaggcattaaagagctggggtctcaaatcttgaaggaacaccctgtggagaacactcagctccaaaatgaaaaactttacctgtactatttgcagaacggacgcgatatgtacgtggaccaagagttggatattaatcggctgagtgactacgacgttgatcatatcgtcccgcagagcttcctcaaagacgattctattgacaataaggtactgacgcgctctgataaaaaccgtggtaagtcggacaacgtgccctccgaagaggttgtgaaaaagatgaaaaattattggcgccagcttttaaacgcgaagctgatcacacaacgtaaattcgataatttgaccaaggctgaacggggtggcctgagcgagttagataaggcaggatttattaaacgccagttagtggagactcgtcaaatcaccaaacatgtcgcgcagattttggacagccggatgaacaccaagtacgatgaaaatgacaaactgatccgtgaggtgaaagtcattactctgaagtccaaattagttagtgatttccggaaggactttcaattctacaaagtccgtgaaattaataactatcatcacgcacatgacgcgtacctgaatgcagtggttgggaccgcccttatcaagaaatatcctaagctggagtcggagtttgtctatggcgactataaggtatacgatgttcgcaaaatgattgcgaaatctgagcaggagatcggtaaggcaaccgcaaaatatttcttttactcaaacattatgaatttctttaagacagaaatcactctggccaacggggagattcgcaaacgtccgttgatcgaaacaaacggcgagactggcgaaattgtttgggacaaagggcgtgatttcgcgacggtgcgcaaggtactgagcatgcctcaagtcaatattgttaagaaaaccgaagtgcagacgggcgggttttccaaggaaagcatcttacccaaacgtaattcagataaacttattgcacgcaaaaaggactgggatccgaaaaagtatggaggcttcgacagtccaaccgtagcctactctgttctcgttgtagcgaaagtagaaaagggtaaatccaagaaactgaaatctgtcaaggagttgcttggaatcaccattatggagcgtagctccttcgagaagaacccgattgactttctggaagccaaaggatataaagaggtcaagaaagatcttatcattaagctgcctaagtattcactcttcgagctggaaaatggtcgtaaacgcatgctcgcttctgccggcgagttgcagaagggcaatgaattagcacttccatcaaagtacgttaacttcctgtatttggccagccattacgagaaactgaaggggtctccagaggacaacgaacagaaacaattatttgtagagcagcacaagcattatcttgatgaaatcattgagcaaatttccgaattcagtaaacgcgtaatcctggccgatgcaaacctcgacaaggtgctgagcgcttacaataagcatcgcgacaaacctatccgtgagcaggctgaaaatatcattcacctgttcacattaacgaacctgggcgctccggccgcttttaaatatttcgacacgacaatcgaccgtaagcgctataccagtacgaaagaagtgttggatgcgacccttattcaccagtcaattacaggattatatgagacccgtatcgaccttagccaattaggtggggatgcggccaagagaacatgggcccaagccttcaccgagtga

SEQ ID NO: 300 - DNA, 4149 bp, synthetic construct
  source 1..4149: mol_type = other DNA
atggacaaaaagtactctattggcctggatatcgggaccaacagcgtcgggtgggctgttatcaccgacgagtataaagtaccttcgaaaaagttcaaagtgctgggcaacaccgatcgccattcaatcaaaaagaacttgattggtgcgctgttgtttgactccggggaaaccgccgaggcgactcgccttaaacgtacagcacgtcgccggtacactcggcgtaagaatcgcatttgctatttgcaggaaatctttagcaacgagatggcaaaagtcgatgactcgtttttccaccgcctcgaggaaagctttctggtggaggaagacaaaaagcatgagcgtcacccgatcttcggcaacattgtcgatgaagtagcgtatcatgaaaaatacccaaccatttaccacttacgcaaaaagctggtggacagcactgacaaagctgatttgcgccttatctatttagccctggcacatatgattaagtttcgtggtcacttcctgatcgaaggagacttaaatcccgacaacagtgatgttgataaattgtttattcagcttgtccaaacttacaatcaactgttcgaggaaaacccgatcaatgcctccggtgtggatgcaaaagccattttaagtgcacgccttagcaagtcccgtcgcttagaaaaccttatcgcgcagctgcccggcgagaaaaagaatggtttgtttgggaaccttattgccttgagcttaggcctcaccccgaatttcaaaagtaatttcgatcttgcagaagacgccaaattacaactgtcgaaggatacttatgatgacgatctcgataatctgttagcgcagattggtgaccaatacgccgatctttttctggcggctaaaaatctgagcgacgccatcttgctttcggatattctccgcgttaacaccgaaatcacgaaagcgcctcttagtgccagcatgattaaacgttatgatgaacaccaccaggacctgaccttactcaaagcgttggttcgccagcaactgccagagaagtacaaagaaatcttctttgatcagtcaaagaatggttatgccggctatattgacgggggtgcaagccaagaggaattctacaaatttatcaagcctattctggagaaaatggatggcaccgaagagttattggtgaagcttaaccgtgaagacctcctgcggaaacagcgcacattcgataatggttcgatcccacaccaaatccatttgggggagttacacgctattttgcgtcgccaggaagacttttaccctttcctgaaggataaccgggagaaaattgagaagatccttacctttcgtattccgtattacgtaggccccttagcacggggtaatagccgtttcgcgtggatgacacggaagtcggaagagacgatcaccccgtggaacttcgaagaggtagtcgacaagggcgcatcagcgcagtcttttattgaacgtatgacgaatttcgataaaaacttgcccaatgagaaggtgcttccgaaacattccttgttatatgaatattttacagtttacaacgagctgaccaaggttaaatacgtgacggaaggaatgcgcaagcccgcttttcttagcggtgagcaaaaaaaggcgatcgtcgacctgttattcaaaacgaatcgtaaggtgactgtaaagcaactcaaagaagattacttcaaaaagattgagtgcttcgacagcgtcgaaatctctggggtagaggatcggtttaacgcaagtttaggtacctaccatgacctgcttaaaatcattaaggataaagacttcttagataatgaagagaacgaagatattctcgaggacatcgtcttgacgttaaccttatttgaggatcgtgaaatgattgaggaacgcctcaaaacttatgcccacctgttcgacgataaggtgatgaagcagctgaaacgtcggcgctacacaggatggggccgcttgagtcgcaaacttattaacggaatccgtgacaagcaatccggcaaaacgattctggatttcttgaagtcggacggatttgctaatcgcaacttcatgcagttgatccatgatgactccctgacttttaaagaggatattcaaaaggcgcaggttagtggtcaaggcgacagcttacacgaacacatcgcaaatttggctggttcgccggccattaaaaaggggatcctccagaccgtgaaagttgtagatgagcttgttaaggtcatgggtcgtcataagcccgaaaacatcgtgattgaaatggcgcgggagaatcaaacgacccagaaaggacaaaagaatagccgtgaacggatgaagcggatcgaggaaggcattaaagagctggggtctcaaatcttgaaggaacaccctgtggagaacactcagctccaaaatgaaaaactttacctgtactatttgcagaacggacgcgatatgtacgtggaccaagagttggatattaatcggctgagtgactacgacgttgatcatatcgtcccgcagagcttcctcaaagacgattctattgacaataaggtactgacgcgctctgataaaaaccgtggtaagtcggacaacgtgccctccgaagaggttgtgaaaaagatgaaaaattattggcgccagcttttaaacgcgaagctgatcacacaacgtaaattcgataatttgaccaaggctgaacggggtggcctgagcgagttagataaggcaggatttattaaacgccagttagtggagactcgtcaaatcaccaaacatgtcgcgcagattttggacagccggatgaacaccaagtacgatgaaaatgacaaactgatccgtgaggtgaaagtcattactctgaagtccaaattagttagtgatttccggaaggactttcaattctacaaagtccgtgaaattaataactatcatcacgcacatgacgcgtacctgaatgcagtggttgggaccgcccttatcaagaaatatcctaagctggagtcggagtttgtctatggcgactataaggtatacgatgttcgcaaaatgattgcgaaatctgagcaggagatcggtaaggcaaccgcaaaatatttcttttactcaaacattatgaatttctttaagacagaaatcactctggccaacggggagattcgcaaacgtccgttgatcgaaacaaacggcgagactggcgaaattgtttgggacaaagggcgtgatttcgcgacggtgcgcaaggtactgagcatgcctcaagtcaatattgttaagaaaaccgaagtgcagacgggcgggttttccaaggaaagcatcttacccaaacgtaattcagataaacttattgcacgcaaaaaggactgggatccgaaaaagtatggaggcttcgacagtccaaccgtagcctactctgttctcgttgtagcgaaagtagaaaagggtaaatccaagaaactgaaatctgtcaaggagttgcttggaatcaccattatggagcgtagctccttcgagaagaacccgattgactttctggaagccaaaggatataaagaggtcaagaaagatcttatcattaagctgcctaagtattcactcttcgagctggaaaatggtcgtaaacgcatgctcgcttctgccggcgagttgcagaagggcaatgaattagcacttccatcaaagtacgttaacttcctgtatttggccagccattacgagaaactgaaggggtctccagaggacaacgaacagaaacaattatttgtagagcagcacaagcattatcttgatgaaatcattgagcaaatttccgaattcagtaaacgcgtaatcctggccgatgcaaacctcgacaaggtgctgagcgcttacaataagcatcgcgacaaacctatccgtgagcaggctgaaaatatcattcacctgttcacattaacgaacctgggcgctccggccgcttttaaatatttcgacacgacaatcgaccgtaagcgctataccagtacgaaagaagtgttggatgcgacccttattcaccagtcaattacaggattatatgagacccgtatcgaccttagccaattaggtggggatgcggccaagcggagatacagcgacgccttcagactgcctgtttga

SEQ ID NO: 301 - DNA, 4140 bp, synthetic construct
  source 1..4140: mol_type = other DNA
atggacaaaaagtactctattggcctggatatcgggaccaacagcgtcgggtgggctgttatcaccgacgagtataaagtaccttcgaaaaagttcaaagtgctgggcaacaccgatcgccattcaatcaaaaagaacttgattggtgcgctgttgtttgactccggggaaaccgccgaggcgactcgccttaaacgtacagcacgtcgccggtacactcggcgtaagaatcgcatttgctatttgcaggaaatctttagcaacgagatggcaaaagtcgatgactcgtttttccaccgcctcgaggaaagctttctggtggaggaagacaaaaagcatgagcgtcacccgatcttcggcaacattgtcgatgaagtagcgtatcatgaaaaatacccaaccatttaccacttacgcaaaaagctggtggacagcactgacaaagctgatttgcgccttatctatttagccctggcacatatgattaagtttcgtggtcacttcctgatcgaaggagacttaaatcccgacaacagtgatgttgataaattgtttattcagcttgtccaaacttacaatcaactgttcgaggaaaacccgatcaatgcctccggtgtggatgcaaaagccattttaagtgcacgccttagcaagtcccgtcgcttagaaaaccttatcgcgcagctgcccggcgagaaaaagaatggtttgtttgggaaccttattgccttgagcttaggcctcaccccgaatttcaaaagtaatttcgatcttgcagaagacgccaaattacaactgtcgaaggatacttatgatgacgatctcgataatctgttagcgcagattggtgaccaatacgccgatctttttctggcggctaaaaatctgagcgacgccatcttgctttcggatattctccgcgttaacaccgaaatcacgaaagcgcctcttagtgccagcatgattaaacgttatgatgaacaccaccaggacctgaccttactcaaagcgttggttcgccagcaactgccagagaagtacaaagaaatcttctttgatcagtcaaagaatggttatgccggctatattgacgggggtgcaagccaagaggaattctacaaatttatcaagcctattctggagaaaatggatggcaccgaagagttattggtgaagcttaaccgtgaagacctcctgcggaaacagcgcacattcgataatggttcgatcccacaccaaatccatttgggggagttacacgctattttgcgtcgccaggaagacttttaccctttcctgaaggataaccgggagaaaattgagaagatccttacctttcgtattccgtattacgtaggccccttagcacggggtaatagccgtttcgcgtggatgacacggaagtcggaagagacgatcaccccgtggaacttcgaagaggtagtcgacaagggcgcatcagcgcagtcttttattgaacgtatgacgaatttcgataaaaacttgcccaatgagaaggtgcttccgaaacattccttgttatatgaatattttacagtttacaacgagctgaccaaggttaaatacgtgacggaaggaatgcgcaagcccgcttttcttagcggtgagcaaaaaaaggcgatcgtcgacctgttattcaaaacgaatcgtaaggtgactgtaaagcaactcaaagaagattacttcaaaaagattgagtgcttcgacagcgtcgaaatctctggggtagaggatcggtttaacgcaagtttaggtacctaccatgacctgcttaaaatcattaaggataaagacttcttagataatgaagagaacgaagatattctcgaggacatcgtcttgacgttaaccttatttgaggatcgtgaaatgattgaggaacgcctcaaaacttatgcccacctgttcgacgataaggtgatgaagcagctgaaacgtcggcgctacacaggatggggccgcttgagtcgcaaacttattaacggaatccgtgacaagcaatccggcaaaacgattctggatttcttgaagtcggacggatttgctaatcgcaacttcatgcagttgatccatgatgactccctgacttttaaagaggatattcaaaaggcgcaggttagtggtcaaggcgacagcttacacgaacacatcgcaaatttggctggttcgccggccattaaaaaggggatcctccagaccgtgaaagttgtagatgagcttgttaaggtcatgggtcgtcataagcccgaaaacatcgtgattgaaatggcgcgggagaatcaaacgacccagaaaggacaaaagaatagccgtgaacggatgaagcggatcgaggaaggcattaaagagctggggtctcaaatcttgaaggaacaccctgtggagaacactcagctccaaaatgaaaaactttacctgtactatttgcagaacggacgcgatatgtacgtggaccaagagttggatattaatcggctgagtgactacgacgttgatcatatcgtcccgcagagcttcctcaaagacgattctattgacaataaggtactgacgcgctctgataaaaaccgtggtaagtcggacaacgtgccctccgaagaggttgtgaaaaagatgaaaaattattggcgccagcttttaaacgcgaagctgatcacacaacgtaaattcgataatttgaccaaggctgaacggggtggcctgagcgagttagataaggcaggatttattaaacgccagttagtggagactcgtcaaatcaccaaacatgtcgcgcagattttggacagccggatgaacaccaagtacgatgaaaatgacaaactgatccgtgaggtgaaagtcattactctgaagtccaaattagttagtgatttccggaaggactttcaattctacaaagtccgtgaaattaataactatcatcacgcacatgacgcgtacctgaatgcagtggttgggaccgcccttatcaagaaatatcctaagctggagtcggagtttgtctatggcgactataaggtatacgatgttcgcaaaatgattgcgaaatctgagcaggagatcggtaaggcaaccgcaaaatatttcttttactcaaacattatgaatttctttaagacagaaatcactctggccaacggggagattcgcaaacgtccgttgatcgaaacaaacggcgagactggcgaaattgtttgggacaaagggcgtgatttcgcgacggtgcgcaaggtactgagcatgcctcaagtcaatattgttaagaaaaccgaagtgcagacgggcgggttttccaaggaaagcatcttacccaaacgtaattcagataaacttattgcacgcaaaaaggactgggatccgaaaaagtatggaggcttcgacagtccaaccgtagcctactctgttctcgttgtagcgaaagtagaaaagggtaaatccaagaaactgaaatctgtcaaggagttgcttggaatcaccattatggagcgtagctccttcgagaagaacccgattgactttctggaagccaaaggatataaagaggtcaagaaagatcttatcattaagctgcctaagtattcactcttcgagctggaaaatggtcgtaaacgcatgctcgcttctgccggcgagttgcagaagggcaatgaattagcacttccatcaaagtacgttaacttcctgtatttggccagccattacgagaaactgaaggggtctccagaggacaacgaacagaaacaattatttgtagagcagcacaagcattatcttgatgaaatcattgagcaaatttccgaattcagtaaacgcgtaatcctggccgatgcaaacctcgacaaggtgctgagcgcttacaataagcatcgcgacaaacctatccgtgagcaggctgaaaatatcattcacctgttcacattaacgaacctgggcgctccggccgcttttaaatatttcgacacgacaatcgaccgtaagcgctataccagtacgaaagaagtgttggatgcgacccttattcaccagtcaattacaggattatatgagacccgtatcgaccttagccaattaggtggggatgcggccaagcggtcttggagcatggccttttgctga

SEQ ID NO: 302 - DNA, 4149 bp, synthetic construct
  source 1..4149: mol_type = other DNA
atggacaaaaagtactctattggcctggatatcgggaccaacagcgtcgggtgggctgttatcaccgacgagtataaagtaccttcgaaaaagttcaaagtgctgggcaacaccgatcgccattcaatcaaaaagaacttgattggtgcgctgttgtttgactccggggaaaccgccgaggcgactcgccttaaacgtacagcacgtcgccggtacactcggcgtaagaatcgcatttgctatttgcaggaaatctttagcaacgagatggcaaaagtcgatgactcgtttttccaccgcctcgaggaaagctttctggtggaggaagacaaaaagcatgagcgtcacccgatcttcggcaacattgtcgatgaagtagcgtatcatgaaaaatacccaaccatttaccacttacgcaaaaagctggtggacagcactgacaaagctgatttgcgccttatctatttagccctggcacatatgattaagtttcgtggtcacttcctgatcgaaggagacttaaatcccgacaacagtgatgttgataaattgtttattcagcttgtccaaacttacaatcaactgttcgaggaaaacccgatcaatgcctccggtgtggatgcaaaagccattttaagtgcacgccttagcaagtcccgtcgcttagaaaaccttatcgcgcagctgcccggcgagaaaaagaatggtttgtttgggaaccttattgccttgagcttaggcctcaccccgaatttcaaaagtaatttcgatcttgcagaagacgccaaattacaactgtcgaaggatacttatgatgacgatctcgataatctgttagcgcagattggtgaccaatacgccgatctttttctggcggctaaaaatctgagcgacgccatcttgctttcggatattctccgcgttaacaccgaaatcacgaaagcgcctcttagtgccagcatgattaaacgttatgatgaacaccaccaggacctgaccttactcaaagcgttggttcgccagcaactgccagagaagtacaaagaaatcttctttgatcagtcaaagaatggttatgccggctatattgacgggggtgcaagccaagaggaattctacaaatttatcaagcctattctggagaaaatggatggcaccgaagagttattggtgaagcttaaccgtgaagacctcctgcggaaacagcgcacattcgataatggttcgatcccacaccaaatccatttgggggagttacacgctattttgcgtcgccaggaagacttttaccctttcctgaaggataaccgggagaaaattgagaagatccttacctttcgtattccgtattacgtaggccccttagcacggggtaatagccgtttcgcgtggatgacacggaagtcggaagagacgatcaccccgtggaacttcgaagaggtagtcgacaagggcgcatcagcgcagtcttttattgaacgtatgacgaatttcgataaaaacttgcccaatgagaaggtgcttccgaaacattccttgttatatgaatattttacagtttacaacgagctgaccaaggttaaatacgtgacggaaggaatgcgcaagcccgcttttcttagcggtgagcaaaaaaaggcgatcgtcgacctgttattcaaaacgaatcgtaaggtgactgtaaagcaactcaaagaagattacttcaaaaagattgagtgcttcgacagcgtcgaaatctctggggtagaggatcggtttaacgcaagtttaggtacctaccatgacctgcttaaaatcattaaggataaagacttcttagataatgaagagaacgaagatattctcgaggacatcgtcttgacgttaaccttatttgaggatcgtgaaatgattgaggaacgcctcaaaacttatgcccacctgttcgacgataaggtgatgaagcagctgaaacgtcggcgctacacaggatggggccgcttgagtcgcaaacttattaacggaatccgtgacaagcaatccggcaaaacgattctggatttcttgaagtcggacggatttgctaatcgcaacttcatgcagttgatccatgatgactccctgacttttaaagaggatattcaaaaggcgcaggttagtggtcaaggcgacagcttacacgaacacatcgcaaatttggctggttcgccggccattaaaaaggggatcctccagaccgtgaaagttgtagatgagcttgttaaggtcatgggtcgtcataagcccgaaaacatcgtgattgaaatggcgcgggagaatcaaacgacccagaaaggacaaaagaatagccgtgaacggatgaagcggatcgaggaaggcattaaagagctggggtctcaaatcttgaaggaacaccctgtggagaacactcagctccaaaatgaaaaactttacctgtactatttgcagaacggacgcgatatgtacgtggaccaagagttggatattaatcggctgagtgactacgacgttgatcatatcgtcccgcagagcttcctcaaagacgattctattgacaataaggtactgacgcgctctgataaaaaccgtggtaagtcggacaacgtgccctccgaagaggttgtgaaaaagatgaaaaattattggcgccagcttttaaacgcgaagctgatcacacaacgtaaattcgataatttgaccaaggctgaacggggtggcctgagcgagttagataaggcaggatttattaaacgccagttagtggagactcgtcaaatcaccaaacatgtcgcgcagattttggacagccggatgaacaccaagtacgatgaaaatgacaaactgatccgtgaggtgaaagtcattactctgaagtccaaattagttagtgatttccggaaggactttcaattctacaaagtccgtgaaattaataactatcatcacgcacatgacgcgtacctgaatgcagtggttgggaccgcccttatcaagaaatatcctaagctggagtcggagtttgtctatggcgactataaggtatacgatgttcgcaaaatgattgcgaaatctgagcaggagatcggtaaggcaaccgcaaaatatttcttttactcaaacattatgaatttctttaagacagaaatcactctggccaacggggagattcgcaaacgtccgttgatcgaaacaaacggcgagactggcgaaattgtttgggacaaagggcgtgatttcgcgacggtgcgcaaggtactgagcatgcctcaagtcaatattgttaagaaaaccgaagtgcagacgggcgggttttccaaggaaagcatcttacccaaacgtaattcagataaacttattgcacgcaaaaaggactgggatccgaaaaagtatggaggcttcgacagtccaaccgtagcctactctgttctcgttgtagcgaaagtagaaaagggtaaatccaagaaactgaaatctgtcaaggagttgcttggaatcaccattatggagcgtagctccttcgagaagaacccgattgactttctggaagccaaaggatataaagaggtcaagaaagatcttatcattaagctgcctaagtattcactcttcgagctggaaaatggtcgtaaacgcatgctcgcttctgccggcgagttgcagaagggcaatgaattagcacttccatcaaagtacgttaacttcctgtatttggccagccattacgagaaactgaaggggtctccagaggacaacgaacagaaacaattatttgtagagcagcacaagcattatcttgatgaaatcattgagcaaatttccgaattcagtaaacgcgtaatcctggccgatgcaaacctcgacaaggtgctgagcgcttacaataagcatcgcgacaaacctatccgtgagcaggctgaaaatatcattcacctgttcacattaacgaacctgggcgctccggccgcttttaaatatttcgacacgacaatcgaccgtaagcgctataccagtacgaaagaagtgttggatgcgacccttattcaccagtcaattacaggattatatgagacccgtatcgaccttagccaattaggtggggatgcggccatcagccggaagagaaagcgcgacctggaattcgtgtga

SEQ ID NO: 303 - DNA, 4149 bp, synthetic construct
  source 1..4149: mol_type = other DNA
atggacaaaaagtactctattggcctggatatcgggaccaacagcgtcgggtgggctgttatcaccgacgagtataaagtaccttcgaaaaagttcaaagtgctgggcaacaccgatcgccattcaatcaaaaagaacttgattggtgcgctgttgtttgactccggggaaaccgccgaggcgactcgccttaaacgtacagcacgtcgccggtacactcggcgtaagaatcgcatttgctatttgcaggaaatctttagcaacgagatggcaaaagtcgatgactcgtttttccaccgcctcgaggaaagctttctggtggaggaagacaaaaagcatgagcgtcacccgatcttcggcaacattgtcgatgaagtagcgtatcatgaaaaatacccaaccatttaccacttacgcaaaaagctggtggacagcactgacaaagctgatttgcgccttatctatttagccctggcacatatgattaagtttcgtggtcacttcctgatcgaaggagacttaaatcccgacaacagtgatgttgataaattgtttattcagcttgtccaaacttacaatcaactgttcgaggaaaacccgatcaatgcctccggtgtggatgcaaaagccattttaagtgcacgccttagcaagtcccgtcgcttagaaaaccttatcgcgcagctgcccggcgagaaaaagaatggtttgtttgggaaccttattgccttgagcttaggcctcaccccgaatttcaaaagtaatttcgatcttgcagaagacgccaaattacaactgtcgaaggatacttatgatgacgatctcgataatctgttagcgcagattggtgaccaatacgccgatctttttctggcggctaaaaatctgagcgacgccatcttgctttcggatattctccgcgttaacaccgaaatcacgaaagcgcctcttagtgccagcatgattaaacgttatgatgaacaccaccaggacctgaccttactcaaagcgttggttcgccagcaactgccagagaagtacaaagaaatcttctttgatcagtcaaagaatggttatgccggctatattgacgggggtgcaagccaagaggaattctacaaatttatcaagcctattctggagaaaatggatggcaccgaagagttattggtgaagcttaaccgtgaagacctcctgcggaaacagcgcacattcgataatggttcgatcccacaccaaatccatttgggggagttacacgctattttgcgtcgccaggaagacttttaccctttcctgaaggataaccgggagaaaattgagaagatccttacctttcgtattccgtattacgtaggccccttagcacggggtaatagccgtttcgcgtggatgacacggaagtcggaagagacgatcaccccgtggaacttcgaagaggtagtcgacaagggcgcatcagcgcagtcttttattgaacgtatgacgaatttcgataaaaacttgcccaatgagaaggtgcttccgaaacattccttgttatatgaatattttacagtttacaacgagctgaccaaggttaaatacgtgacggaaggaatgcgcaagcccgcttttcttagcggtgagcaaaaaaaggcgatcgtcgacctgttattcaaaacgaatcgtaaggtgactgtaaagcaactcaaagaagattacttcaaaaagattgagtgcttcgacagcgtcgaaatctctggggtagaggatcggtttaacgcaagtttaggtacctaccatgacctgcttaaaatcattaaggataaagacttcttagataatgaagagaacgaagatattctcgaggacatcgtcttgacgttaaccttatttgaggatcgtgaaatgattgaggaacgcctcaaaacttatgcccacctgttcgacgataaggtgatgaagcagctgaaacgtcggcgctacacaggatggggccgcttgagtcgcaaacttattaacggaatccgtgacaagcaatccggcaaaacgattctggatttcttgaagtcggacggatttgctaatcgcaacttcatgcagttgatccatgatgactccctgacttttaaagaggatattcaaaaggcgcaggttagtggtcaaggcgacagcttacacgaacacatcgcaaatttggctggttcgccggccattaaaaaggggatcctccagaccgtgaaagttgtagatgagcttgttaaggtcatgggtcgtcataagcccgaaaacatcgtgattgaaatggcgcgggagaatcaaacgacccagaaaggacaaaagaatagccgtgaacggatgaagcggatcgaggaaggcattaaagagctggggtctcaaatcttgaaggaacaccctgtggagaacactcagctccaaaatgaaaaactttacctgtactatttgcagaacggacgcgatatgtacgtggaccaagagttggatattaatcggctgagtgactacgacgttgatcatatcgtcccgcagagcttcctcaaagacgattctattgacaataaggtactgacgcgctctgataaaaaccgtggtaagtcggacaacgtgccctccgaagaggttgtgaaaaagatgaaaaattattggcgccagcttttaaacgcgaagctgatcacacaacgtaaattcgataatttgaccaaggctgaacggggtggcctgagcgagttagataaggcaggatttattaaacgccagttagtggagactcgtcaaatcaccaaacatgtcgcgcagattttggacagccggatgaacaccaagtacgatgaaaatgacaaactgatccgtgaggtgaaagtcattactctgaagtccaaattagttagtgatttccggaaggactttcaattctacaaagtccgtgaaattaataactatcatcacgcacatgacgcgtacctgaatgcagtggttgggaccgcccttatcaagaaatatcctaagctggagtcggagtttgtctatggcgactataaggtatacgatgttcgcaaaatgattgcgaaatctgagcaggagatcggtaaggcaaccgcaaaatatttcttttactcaaacattatgaatttctttaagacagaaatcactctggccaacggggagattcgcaaacgtccgttgatcgaaacaaacggcgagactggcgaaattgtttgggacaaagggcgtgatttcgcgacggtgcgcaaggtactgagcatgcctcaagtcaatattgttaagaaaaccgaagtgcagacgggcgggttttccaaggaaagcatcttacccaaacgtaattcagataaacttattgcacgcaaaaaggactgggatccgaaaaagtatggaggcttcgacagtccaaccgtagcctactctgttctcgttgtagcgaaagtagaaaagggtaaatccaagaaactgaaatctgtcaaggagttgcttggaatcaccattatggagcgtagctccttcgagaagaacccgattgactttctggaagccaaaggatataaagaggtcaagaaagatcttatcattaagctgcctaagtattcactcttcgagctggaaaatggtcgtaaacgcatgctcgcttctgccggcgagttgcagaagggcaatgaattagcacttccatcaaagtacgttaacttcctgtatttggccagccattacgagaaactgaaggggtctccagaggacaacgaacagaaacaattatttgtagagcagcacaagcattatcttgatgaaatcattgagcaaatttccgaattcagtaaacgcgtaatcctggccgatgcaaacctcgacaaggtgctgagcgcttacaataagcatcgcgacaaacctatccgtgagcaggctgaaaatatcattcacctgttcacattaacgaacctgggcgctccggccgcttttaaatatttcgacacgacaatcgaccgtaagcgctataccagtacgaaagaagtgttggatgcgacccttattcaccagtcaattacaggattatatgagacccgtatcgaccttagccaattaggtggggatgcggccatcggacggaaaagagtgtgggccgtcgccttctattga

SEQ ID NO: 304 - DNA, 4149 bp, synthetic construct
  source 1..4149: mol_type = other DNA
atggacaaaaagtactctattggcctggatatcgggaccaacagcgtcgggtgggctgttatcaccgacgagtataaagtaccttcgaaaaagttcaaagtgctgggcaacaccgatcgccattcaatcaaaaagaacttgattggtgcgctgttgtttgactccggggaaaccgccgaggcgactcgccttaaacgtacagcacgtcgccggtacactcggcgtaagaatcgcatttgctatttgcaggaaatctttagcaacgagatggcaaaagtcgatgactcgtttttccaccgcctcgaggaaagctttctggtggaggaagacaaaaagcatgagcgtcacccgatcttcggcaacattgtcgatgaagtagcgtatcatgaaaaatacccaaccatttaccacttacgcaaaaagctggtggacagcactgacaaagctgatttgcgccttatctatttagccctggcacatatgattaagtttcgtggtcacttcctgatcgaaggagacttaaatcccgacaacagtgatgttgataaattgtttattcagcttgtccaaacttacaatcaactgttcgaggaaaacccgatcaatgcctccggtgtggatgcaaaagccattttaagtgcacgccttagcaagtcccgtcgcttagaaaaccttatcgcgcagctgcccggcgagaaaaagaatggtttgtttgggaaccttattgccttgagcttaggcctcaccccgaatttcaaaagtaatttcgatcttgcagaagacgccaaattacaactgtcgaaggatacttatgatgacgatctcgataatctgttagcgcagattggtgaccaatacgccgatctttttctggcggctaaaaatctgagcgacgccatcttgctttcggatattctccgcgttaacaccgaaatcacgaaagcgcctcttagtgccagcatgattaaacgttatgatgaacaccaccaggacctgaccttactcaaagcgttggttcgccagcaactgccagagaagtacaaagaaatcttctttgatcagtcaaagaatggttatgccggctatattgacgggggtgcaagccaagaggaattctacaaatttatcaagcctattctggagaaaatggatggcaccgaagagttattggtgaagcttaaccgtgaagacctcctgcggaaacagcgcacattcgataatggttcgatcccacaccaaatccatttgggggagttacacgctattttgcgtcgccaggaagacttttaccctttcctgaaggataaccgggagaaaattgagaagatccttacctttcgtattccgtattacgtaggccccttagcacggggtaatagccgtttcgcgtggatgacacggaagtcggaagagacgatcaccccgtggaacttcgaagaggtagtcgacaagggcgcatcagcgcagtcttttattgaacgtatgacgaatttcgataaaaacttgcccaatgagaaggtgcttccgaaacattccttgttatatgaatattttacagtttacaacgagctgaccaaggttaaatacgtgacggaaggaatgcgcaagcccgcttttcttagcggtgagcaaaaaaaggcgatcgtcgacctgttattcaaaacgaatcgtaaggtgactgtaaagcaactcaaagaagattacttcaaaaagattgagtgcttcgacagcgtcgaaatctctggggtagaggatcggtttaacgcaagtttaggtacctaccatgacctgcttaaaatcattaaggataaagacttcttagataatgaagagaacgaagatattctcgaggacatcgtcttgacgttaaccttatttgaggatcgtgaaatgattgaggaacgcctcaaaacttatgcccacctgttcgacgataaggtgatgaagcagctgaaacgtcggcgctacacaggatggggccgcttgagtcgcaaacttattaacggaatccgtgacaagcaatccggcaaaacgattctggatttcttgaagtcggacggatttgctaatcgcaacttcatgcagttgatccatgatgactccctgacttttaaagaggatattcaaaaggcgcaggttagtggtcaaggcgacagcttacacgaacacatcgcaaatttggctggttcgccggccattaaaaaggggatcctccagaccgtgaaagttgtagatgagcttgttaaggtcatgggtcgtcataagcccgaaaacatcgtgattgaaatggcgcgggagaatcaaacgacccagaaaggacaaaagaatagccgtgaacggatgaagcggatcgaggaaggcattaaagagctggggtctcaaatcttgaaggaacaccctgtggagaacactcagctccaaaatgaaaaactttacctgtactatttgcagaacggacgcgatatgtacgtggaccaagagttggatattaatcggctgagtgactacgacgttgatcatatcgtcccgcagagcttcctcaaagacgattctattgacaataaggtactgacgcgctctgataaaaaccgtggtaagtcggacaacgtgccctccgaagaggttgtgaaaaagatgaaaaattattggcgccagcttttaaacgcgaagctgatcacacaacgtaaattcgataatttgaccaaggctgaacggggtggcctgagcgagttagataaggcaggatttattaaacgccagttagtggagactcgtcaaatcaccaaacatgtcgcgcagattttggacagccggatgaacaccaagtacgatgaaaatgacaaactgatccgtgaggtgaaagtcattactctgaagtccaaattagttagtgatttccggaaggactttcaattctacaaagtccgtgaaattaataactatcatcacgcacatgacgcgtacctgaatgcagtggttgggaccgcccttatcaagaaatatcctaagctggagtcggagtttgtctatggcgactataaggtatacgatgttcgcaaaatgattgcgaaatctgagcaggagatcggtaaggcaaccgcaaaatatttcttttactcaaacattatgaatttctttaagacagaaatcactctggccaacggggagattcgcaaacgtccgttgatcgaaacaaacggcgagactggcgaaattgtttgggacaaagggcgtgatttcgcgacggtgcgcaaggtactgagcatgcctcaagtcaatattgttaagaaaaccgaagtgcagacgggcgggttttccaaggaaagcatcttacccaaacgtaattcagataaacttattgcacgcaaaaaggactgggatccgaaaaagtatggaggcttcgacagtccaaccgtagcctactctgttctcgttgtagcgaaagtagaaaagggtaaatccaagaaactgaaatctgtcaaggagttgcttggaatcaccattatggagcgtagctccttcgagaagaacccgattgactttctggaagccaaaggatataaagaggtcaagaaagatcttatcattaagctgcctaagtattcactcttcgagctggaaaatggtcgtaaacgcatgctcgcttctgccggcgagttgcagaagggcaatgaattagcacttccatcaaagtacgttaacttcctgtatttggccagccattacgagaaactgaaggggtctccagaggacaacgaacagaaacaattatttgtagagcagcacaagcattatcttgatgaaatcattgagcaaatttccgaattcagtaaacgcgtaatcctggccgatgcaaacctcgacaaggtgctgagcgcttacaataagcatcgcgacaaacctatccgtgagcaggctgaaaatatcattcacctgttcacattaacgaacctgggcgctccggccgcttttaaatatttcgacacgacaatcgaccgtaagcgctataccagtacgaaagaagtgttggatgcgacccttattcaccagtcaattacaggattatatgagacccgtatcgaccttagccaattaggtggggatgcggccaagcggaagtacagcgacgcctttggactgcctgtttga

SEQ ID NO: 305 - DNA, 4143 bp, synthetic construct
  source 1..4143: mol_type = other DNA
atggacaaaaagtactctattggcctggatatcgggaccaacagcgtcgggtgggctgttatcaccgacgagtataaagtaccttcgaaaaagttcaaagtgctgggcaacaccgatcgccattcaatcaaaaagaacttgattggtgcgctgttgtttgactccggggaaaccgccgaggcgactcgccttaaacgtacagcacgtcgccggtacactcggcgtaagaatcgcatttgctatttgcaggaaatctttagcaacgagatggcaaaagtcgatgactcgtttttccaccgcctcgaggaaagctttctggtggaggaagacaaaaagcatgagcgtcacccgatcttcggcaacattgtcgatgaagtagcgtatcatgaaaaatacccaaccatttaccacttacgcaaaaagctggtggacagcactgacaaagctgatttgcgccttatctatttagccctggcacatatgattaagtttcgtggtcacttcctgatcgaaggagacttaaatcccgacaacagtgatgttgataaattgtttattcagcttgtccaaacttacaatcaactgttcgaggaaaacccgatcaatgcctccggtgtggatgcaaaagccattttaagtgcacgccttagcaagtcccgtcgcttagaaaaccttatcgcgcagctgcccggcgagaaaaagaatggtttgtttgggaaccttattgccttgagcttaggcctcaccccgaatttcaaaagtaatttcgatcttgcagaagacgccaaattacaactgtcgaaggatacttatgatgacgatctcgataatctgttagcgcagattggtgaccaatacgccgatctttttctggcggctaaaaatctgagcgacgccatcttgctttcggatattctccgcgttaacaccgaaatcacgaaagcgcctcttagtgccagcatgattaaacgttatgatgaacaccaccaggacctgaccttactcaaagcgttggttcgccagcaactgccagagaagtacaaagaaatcttctttgatcagtcaaagaatggttatgccggctatattgacgggggtgcaagccaagaggaattctacaaatttatcaagcctattctggagaaaatggatggcaccgaagagttattggtgaagcttaaccgtgaagacctcctgcggaaacagcgcacattcgataatggttcgatcccacaccaaatccatttgggggagttacacgctattttgcgtcgccaggaagacttttaccctttcctgaaggataaccgggagaaaattgagaagatccttacctttcgtattccgtattacgtaggccccttagcacggggtaatagccgtttcgcgtggatgacacggaagtcggaagagacgatcaccccgtggaacttcgaagaggtagtcgacaagggcgcatcagcgcagtcttttattgaacgtatgacgaatttcgataaaaacttgcccaatgagaaggtgcttccgaaacattccttgttatatgaatattttacagtttacaacgagctgaccaaggttaaatacgtgacggaaggaatgcgcaagcccgcttttcttagcggtgagcaaaaaaaggcgatcgtcgacctgttattcaaaacgaatcgtaaggtgactgtaaagcaactcaaagaagattacttcaaaaagattgagtgcttcgacagcgtcgaaatctctggggtagaggatcggtttaacgcaagtttaggtacctaccatgacctgcttaaaatcattaaggataaagacttcttagataatgaagagaacgaagatattctcgaggacatcgtcttgacgttaaccttatttgaggatcgtgaaatgattgaggaacgcctcaaaacttatgcccacctgttcgacgataaggtgatgaagcagctgaaacgtcggcgctacacaggatggggccgcttgagtcgcaaacttattaacggaatccgtgacaagcaatccggcaaaacgattctggatttcttgaagtcggacggatttgctaatcgcaacttcatgcagttgatccatgatgactccctgacttttaaagaggatattcaaaaggcgcaggttagtggtcaaggcgacagcttacacgaacacatcgcaaatttggctggttcgccggccattaaaaaggggatcctccagaccgtgaaagttgtagatgagcttgttaaggtcatgggtcgtcataagcccgaaaacatcgtgattgaaatggcgcgggagaatcaaacgacccagaaaggacaaaagaatagccgtgaacggatgaagcggatcgaggaaggcattaaagagctggggtctcaaatcttgaaggaacaccctgtggagaacactcagctccaaaatgaaaaactttacctgtactatttgcagaacggacgcgatatgtacgtggaccaagagttggatattaatcggctgagtgactacgacgttgatcatatcgtcccgcagagcttcctcaaagacgattctattgacaataaggtactgacgcgctctgataaaaaccgtggtaagtcggacaacgtgccctccgaagaggttgtgaaaaagatgaaaaattattggcgccagcttttaaacgcgaagctgatcacacaacgtaaattcgataatttgaccaaggctgaacggggtggcctgagcgagttagataaggcaggatttattaaacgccagttagtggagactcgtcaaatcaccaaacatgtcgcgcagattttggacagccggatgaacaccaagtacgatgaaaatgacaaactgatccgtgaggtgaaagtcattactctgaagtccaaattagttagtgatttccggaaggactttcaattctacaaagtccgtgaaattaataactatcatcacgcacatgacgcgtacctgaatgcagtggttgggaccgcccttatcaagaaatatcctaagctggagtcggagtttgtctatggcgactataaggtatacgatgttcgcaaaatgattgcgaaatctgagcaggagatcggtaaggcaaccgcaaaatatttcttttactcaaacattatgaatttctttaagacagaaatcactctggccaacggggagattcgcaaacgtccgttgatcgaaacaaacggcgagactggcgaaattgtttgggacaaagggcgtgatttcgcgacggtgcgcaaggtactgagcatgcctcaagtcaatattgttaagaaaaccgaagtgcagacgggcgggttttccaaggaaagcatcttacccaaacgtaattcagataaacttattgcacgcaaaaaggactgggatccgaaaaagtatggaggcttcgacagtccaaccgtagcctactctgttctcgttgtagcgaaagtagaaaagggtaaatccaagaaactgaaatctgtcaaggagttgcttggaatcaccattatggagcgtagctccttcgagaagaacccgattgactttctggaagccaaaggatataaagaggtcaagaaagatcttatcattaagctgcctaagtattcactcttcgagctggaaaatggtcgtaaacgcatgctcgcttctgccggcgagttgcagaagggcaatgaattagcacttccatcaaagtacgttaacttcctgtatttggccagccattacgagaaactgaaggggtctccagaggacaacgaacagaaacaattatttgtagagcagcacaagcattatcttgatgaaatcattgagcaaatttccgaattcagtaaacgcgtaatcctggccgatgcaaacctcgacaaggtgctgagcgcttacaataagcatcgcgacaaacctatccgtgagcaggctgaaaatatcattcacctgttcacattaacgaacctgggcgctccggccgcttttaaatatttcgacacgacaatcgaccgtaagcgctataccagtacgaaagaagtgttggatgcgacccttattcaccagtcaattacaggattatatgagacccgtatcgaccttagccaattaggtggggatgcggccaagcggaagagatgggagaacgacatcccctga

SEQ ID NO: 306 - DNA, 4143 bp, synthetic construct
  source 1..4143: mol_type = other DNA
atggacaaaaagtactctattggcctggatatcgggaccaacagcgtcgggtgggctgttatcaccgacgagtataaagtaccttcgaaaaagttcaaagtgctgggcaacaccgatcgccattcaatcaaaaagaacttgattggtgcgctgttgtttgactccggggaaaccgccgaggcgactcgccttaaacgtacagcacgtcgccggtacactcggcgtaagaatcgcatttgctatttgcaggaaatctttagcaacgagatggcaaaagtcgatgactcgtttttccaccgcctcgaggaaagctttctggtggaggaagacaaaaagcatgagcgtcacccgatcttcggcaacattgtcgatgaagtagcgtatcatgaaaaatacccaaccatttaccacttacgcaaaaagctggtggacagcactgacaaagctgatttgcgccttatctatttagccctggcacatatgattaagtttcgtggtcacttcctgatcgaaggagacttaaatcccgacaacagtgatgttgataaattgtttattcagcttgtccaaacttacaatcaactgttcgaggaaaacccgatcaatgcctccggtgtggatgcaaaagccattttaagtgcacgccttagcaagtcccgtcgcttagaaaaccttatcgcgcagctgcccggcgagaaaaagaatggtttgtttgggaaccttattgccttgagcttaggcctcaccccgaatttcaaaagtaatttcgatcttgcagaagacgccaaattacaactgtcgaaggatacttatgatgacgatctcgataatctgttagcgcagattggtgaccaatacgccgatctttttctggcggctaaaaatctgagcgacgccatcttgctttcggatattctccgcgttaacaccgaaatcacgaaagcgcctcttagtgccagcatgattaaacgttatgatgaacaccaccaggacctgaccttactcaaagcgttggttcgccagcaactgccagagaagtacaaagaaatcttctttgatcagtcaaagaatggttatgccggctatattgacgggggtgcaagccaagaggaattctacaaatttatcaagcctattctggagaaaatggatggcaccgaagagttattggtgaagcttaaccgtgaagacctcctgcggaaacagcgcacattcgataatggttcgatcccacaccaaatccatttgggggagttacacgctattttgcgtcgccaggaagacttttaccctttcctgaaggataaccgggagaaaattgagaagatccttacctttcgtattccgtattacgtaggccccttagcacggggtaatagccgtttcgcgtggatgacacggaagtcggaagagacgatcaccccgtggaacttcgaagaggtagtcgacaagggcgcatcagcgcagtcttttattgaacgtatgacgaatttcgataaaaacttgcccaatgagaaggtgcttccgaaacattccttgttatatgaatattttacagtttacaacgagctgaccaaggttaaatacgtgacggaaggaatgcgcaagcccgcttttcttagcggtgagcaaaaaaaggcgatcgtcgacctgttattcaaaacgaatcgtaaggtgactgtaaagcaactcaaagaagattacttcaaaaagattgagtgcttcgacagcgtcgaaatctctggggtagaggatcggtttaacgcaagtttaggtacctaccatgacctgcttaaaatcattaaggataaagacttcttagataatgaagagaacgaagatattctcgaggacatcgtcttgacgttaaccttatttgaggatcgtgaaatgattgaggaacgcctcaaaacttatgcccacctgttcgacgataaggtgatgaagcagctgaaacgtcggcgctacacaggatggggccgcttgagtcgcaaacttattaacggaatccgtgacaagcaatccggcaaaacgattctggatttcttgaagtcggacggatttgctaatcgcaacttcatgcagttgatccatgatgactccctgacttttaaagaggatattcaaaaggcgcaggttagtggtcaaggcgacagcttacacgaacacatcgcaaatttggctggttcgccggccattaaaaaggggatcctccagaccgtgaaagttgtagatgagcttgttaaggtcatgggtcgtcataagcccgaaaacatcgtgattgaaatggcgcgggagaatcaaacgacccagaaaggacaaaagaatagccgtgaacggatgaagcggatcgaggaaggcattaaagagctggggtctcaaatcttgaaggaacaccctgtggagaacactcagctccaaaatgaaaaactttacctgtactatttgcagaacggacgcgatatgtacgtggaccaagagttggatattaatcggctgagtgactacgacgttgatcatatcgtcccgcagagcttcctcaaagacgattctattgacaataaggtactgacgcgctctgataaaaaccgtggtaagtcggacaacgtgccctccgaagaggttgtgaaaaagatgaaaaattattggcgccagcttttaaacgcgaagctgatcacacaacgtaaattcgataatttgaccaaggctgaacggggtggcctgagcgagttagataaggcaggatttattaaacgccagttagtggagactcgtcaaatcaccaaacatgtcgcgcagattttggacagccggatgaacaccaagtacgatgaaaatgacaaactgatccgtgaggtgaaagtcattactctgaagtccaaattagttagtgatttccggaaggactttcaattctacaaagtccgtgaaattaataactatcatcacgcacatgacgcgtacctgaatgcagtggttgggaccgcccttatcaagaaatatcctaagctggagtcggagtttgtctatggcgactataaggtatacgatgttcgcaaaatgattgcgaaatctgagcaggagatcggtaaggcaaccgcaaaatatttcttttactcaaacattatgaatttctttaagacagaaatcactctggccaacggggagattcgcaaacgtccgttgatcgaaacaaacggcgagactggcgaaattgtttgggacaaagggcgtgatttcgcgacggtgcgcaaggtactgagcatgcctcaagtcaatattgttaagaaaaccgaagtgcagacgggcgggttttccaaggaaagcatcttacccaaacgtaattcagataaacttattgcacgcaaaaaggactgggatccgaaaaagtatggaggcttcgacagtccaaccgtagcctactctgttctcgttgtagcgaaagtagaaaagggtaaatccaagaaactgaaatctgtcaaggagttgcttggaatcaccattatggagcgtagctccttcgagaagaacccgattgactttctggaagccaaaggatataaagaggtcaagaaagatcttatcattaagctgcctaagtattcactcttcgagctggaaaatggtcgtaaacgcatgctcgcttctgccggcgagttgcagaagggcaatgaattagcacttccatcaaagtacgttaacttcctgtatttggccagccattacgagaaactgaaggggtctccagaggacaacgaacagaaacaattatttgtagagcagcacaagcattatcttgatgaaatcattgagcaaatttccgaattcagtaaacgcgtaatcctggccgatgcaaacctcgacaaggtgctgagcgcttacaataagcatcgcgacaaacctatccgtgagcaggctgaaaatatcattcacctgttcacattaacgaacctgggcgctccggccgcttttaaatatttcgacacgacaatcgaccgtaagcgctataccagtacgaaagaagtgttggatgcgacccttattcaccagtcaattacaggattatatgagacccgtatcgaccttagccaattaggtggggatgcggccaagcggaagagatgggagaacaacatcccctga

SEQ ID NO: 307 - DNA, 4149 bp, synthetic construct
  source 1..4149: mol_type = other DNA
atggacaaaaagtactctattggcctggatatcgggaccaacagcgtcgggtgggctgttatcaccgacgagtataaagtaccttcgaaaaagttcaaagtgctgggcaacaccgatcgccattcaatcaaaaagaacttgattggtgcgctgttgtttgactccggggaaaccgccgaggcgactcgccttaaacgtacagcacgtcgccggtacactcggcgtaagaatcgcatttgctatttgcaggaaatctttagcaacgagatggcaaaagtcgatgactcgtttttccaccgcctcgaggaaagctttctggtggaggaagacaaaaagcatgagcgtcacccgatcttcggcaacattgtcgatgaagtagcgtatcatgaaaaatacccaaccatttaccacttacgcaaaaagctggtggacagcactgacaaagctgatttgcgccttatctatttagccctggcacatatgattaagtttcgtggtcacttcctgatcgaaggagacttaaatcccgacaacagtgatgttgataaattgtttattcagcttgtccaaacttacaatcaactgttcgaggaaaacccgatcaatgcctccggtgtggatgcaaaagccattttaagtgcacgccttagcaagtcccgtcgcttagaaaaccttatcgcgcagctgcccggcgagaaaaagaatggtttgtttgggaaccttattgccttgagcttaggcctcaccccgaatttcaaaagtaatttcgatcttgcagaagacgccaaattacaactgtcgaaggatacttatgatgacgatctcgataatctgttagcgcagattggtgaccaatacgccgatctttttctggcggctaaaaatctgagcgacgccatcttgctttcggatattctccgcgttaacaccgaaatcacgaaagcgcctcttagtgccagcatgattaaacgttatgatgaacaccaccaggacctgaccttactcaaagcgttggttcgccagcaactgccagagaagtacaaagaaatcttctttgatcagtcaaagaatggttatgccggctatattgacgggggtgcaagccaagaggaattctacaaatttatcaagcctattctggagaaaatggatggcaccgaagagttattggtgaagcttaaccgtgaagacctcctgcggaaacagcgcacattcgataatggttcgatcccacaccaaatccatttgggggagttacacgctattttgcgtcgccaggaagacttttaccctttcctgaaggataaccgggagaaaattgagaagatccttacctttcgtattccgtattacgtaggccccttagcacggggtaatagccgtttcgcgtggatgacacggaagtcggaagagacgatcaccccgtggaacttcgaagaggtagtcgacaagggcgcatcagcgcagtcttttattgaacgtatgacgaatttcgataaaaacttgcccaatgagaaggtgcttccgaaacattccttgttatatgaatattttacagtttacaacgagctgaccaaggttaaatacgtgacggaaggaatgcgcaagcccgcttttcttagcggtgagcaaaaaaaggcgatcgtcgacctgttattcaaaacgaatcgtaaggtgactgtaaagcaactcaaagaagattacttcaaaaagattgagtgcttcgacagcgtcgaaatctctggggtagaggatcggtttaacgcaagtttaggtacctaccatgacctgcttaaaatcattaaggataaagacttcttagataatgaagagaacgaagatattctcgaggacatcgtcttgacgttaaccttatttgaggatcgtgaaatgattgaggaacgcctcaaaacttatgcccacctgttcgacgataaggtgatgaagcagctgaaacgtcggcgctacacaggatggggccgcttgagtcgcaaacttattaacggaatccgtgacaagcaatccggcaaaacgattctggatttcttgaagtcggacggatttgctaatcgcaacttcatgcagttgatccatgatgactccctgacttttaaagaggatattcaaaaggcgcaggttagtggtcaaggcgacagcttacacgaacacatcgcaaatttggctggttcgccggccattaaaaaggggatcctccagaccgtgaaagttgtagatgagcttgttaaggtcatgggtcgtcataagcccgaaaacatcgtgattgaaatggcgcgggagaatcaaacgacccagaaaggacaaaagaatagccgtgaacggatgaagcggatcgaggaaggcattaaagagctggggtctcaaatcttgaaggaacaccctgtggagaacactcagctccaaaatgaaaaactttacctgtactatttgcagaacggacgcgatatgtacgtggaccaagagttggatattaatcggctgagtgactacgacgttgatcatatcgtcccgcagagcttcctcaaagacgattctattgacaataaggtactgacgcgctctgataaaaaccgtggtaagtcggacaacgtgccctccgaagaggttgtgaaaaagatgaaaaattattggcgccagcttttaaacgcgaagctgatcacacaacgtaaattcgataatttgaccaaggctgaacggggtggcctgagcgagttagataaggcaggatttattaaacgccagttagtggagactcgtcaaatcaccaaacatgtcgcgcagattttggacagccggatgaacaccaagtacgatgaaaatgacaaactgatccgtgaggtgaaagtcattactctgaagtccaaattagttagtgatttccggaaggactttcaattctacaaagtccgtgaaattaataactatcatcacgcacatgacgcgtacctgaatgcagtggttgggaccgcccttatcaagaaatatcctaagctggagtcggagtttgtctatggcgactataaggtatacgatgttcgcaaaatgattgcgaaatctgagcaggagatcggtaaggcaaccgcaaaatatttcttttactcaaacattatgaatttctttaagacagaaatcactctggccaacggggagattcgcaaacgtccgttgatcgaaacaaacggcgagactggcgaaattgtttgggacaaagggcgtgatttcgcgacggtgcgcaaggtactgagcatgcctcaagtcaatattgttaagaaaaccgaagtgcagacgggcgggttttccaaggaaagcatcttacccaaacgtaattcagataaacttattgcacgcaaaaaggactgggatccgaaaaagtatggaggcttcgacagtccaaccgtagcctactctgttctcgttgtagcgaaagtagaaaagggtaaatccaagaaactgaaatctgtcaaggagttgcttggaatcaccattatggagcgtagctccttcgagaagaacccgattgactttctggaagccaaaggatataaagaggtcaagaaagatcttatcattaagctgcctaagtattcactcttcgagctggaaaatggtcgtaaacgcatgctcgcttctgccggcgagttgcagaagggcaatgaattagcacttccatcaaagtacgttaacttcctgtatttggccagccattacgagaaactgaaggggtctccagaggacaacgaacagaaacaattatttgtagagcagcacaagcattatcttgatgaaatcattgagcaaatttccgaattcagtaaacgcgtaatcctggccgatgcaaacctcgacaaggtgctgagcgcttacaataagcatcgcgacaaacctatccgtgagcaggctgaaaatatcattcacctgttcacattaacgaacctgggcgctccggccgcttttaaatatttcgacacgacaatcgaccgtaagcgctataccagtacgaaagaagtgttggatgcgacccttattcaccagtcaattacaggattatatgagacccgtatcgaccttagccaattaggtggggatgcggccacaggcggcgtgatgaagagaaaaaggggcagcgtttga

SEQ ID NO: 308 - DNA, 4149 bp, synthetic construct
  source 1..4149: mol_type = other DNA
atggacaaaaagtactctattggcctggatatcgggaccaacagcgtcgggtgggctgttatcaccgacgagtataaagtaccttcgaaaaagttcaaagtgctgggcaacaccgatcgccattcaatcaaaaagaacttgattggtgcgctgttgtttgactccggggaaaccgccgaggcgactcgccttaaacgtacagcacgtcgccggtacactcggcgtaagaatcgcatttgctatttgcaggaaatctttagcaacgagatggcaaaagtcgatgactcgtttttccaccgcctcgaggaaagctttctggtggaggaagacaaaaagcatgagcgtcacccgatcttcggcaacattgtcgatgaagtagcgtatcatgaaaaatacccaaccatttaccacttacgcaaaaagctggtggacagcactgacaaagctgatttgcgccttatctatttagccctggcacatatgattaagtttcgtggtcacttcctgatcgaaggagacttaaatcccgacaacagtgatgttgataaattgtttattcagcttgtccaaacttacaatcaactgttcgaggaaaacccgatcaatgcctccggtgtggatgcaaaagccattttaagtgcacgccttagcaagtcccgtcgcttagaaaaccttatcgcgcagctgcccggcgagaaaaagaatggtttgtttgggaaccttattgccttgagcttaggcctcaccccgaatttcaaaagtaatttcgatcttgcagaagacgccaaattacaactgtcgaaggatacttatgatgacgatctcgataatctgttagcgcagattggtgaccaatacgccgatctttttctggcggctaaaaatctgagcgacgccatcttgctttcggatattctccgcgttaacaccgaaatcacgaaagcgcctcttagtgccagcatgattaaacgttatgatgaacaccaccaggacctgaccttactcaaagcgttggttcgccagcaactgccagagaagtacaaagaaatcttctttgatcagtcaaagaatggttatgccggctatattgacgggggtgcaagccaagaggaattctacaaatttatcaagcctattctggagaaaatggatggcaccgaagagttattggtgaagcttaaccgtgaagacctcctgcggaaacagcgcacattcgataatggttcgatcccacaccaaatccatttgggggagttacacgctattttgcgtcgccaggaagacttttaccctttcctgaaggataaccgggagaaaattgagaagatccttacctttcgtattccgtattacgtaggccccttagcacggggtaatagccgtttcgcgtggatgacacggaagtcggaagagacgatcaccccgtggaacttcgaagaggtagtcgacaagggcgcatcagcgcagtcttttattgaacgtatgacgaatttcgataaaaacttgcccaatgagaaggtgcttccgaaacattccttgttatatgaatattttacagtttacaacgagctgaccaaggttaaatacgtgacggaaggaatgcgcaagcccgcttttcttagcggtgagcaaaaaaaggcgatcgtcgacctgttattcaaaacgaatcgtaaggtgactgtaaagcaactcaaagaagattacttcaaaaagattgagtgcttcgacagcgtcgaaatctctggggtagaggatcggtttaacgcaagtttaggtacctaccatgacctgcttaaaatcattaaggataaagacttcttagataatgaagagaacgaagatattctcgaggacatcgtcttgacgttaaccttatttgaggatcgtgaaatgattgaggaacgcctcaaaacttatgcccacctgttcgacgataaggtgatgaagcagctgaaacgtcggcgctacacaggatggggccgcttgagtcgcaaacttattaacggaatccgtgacaagcaatccggcaaaacgattctggatttcttgaagtcggacggatttgctaatcgcaacttcatgcagttgatccatgatgactccctgacttttaaagaggatattcaaaaggcgcaggttagtggtcaaggcgacagcttacacgaacacatcgcaaatttggctggttcgccggccattaaaaaggggatcctccagaccgtgaaagttgtagatgagcttgttaaggtcatgggtcgtcataagcccgaaaacatcgtgattgaaatggcgcgggagaatcaaacgacccagaaaggacaaaagaatagccgtgaacggatgaagcggatcgaggaaggcattaaagagctggggtctcaaatcttgaaggaacaccctgtggagaacactcagctccaaaatgaaaaactttacctgtactatttgcagaacggacgcgatatgtacgtggaccaagagttggatattaatcggctgagtgactacgacgttgatcatatcgtcccgcagagcttcctcaaagacgattctattgacaataaggtactgacgcgctctgataaaaaccgtggtaagtcggacaacgtgccctccgaagaggttgtgaaaaagatgaaaaattattggcgccagcttttaaacgcgaagctgatcacacaacgtaaattcgataatttgaccaaggctgaacggggtggcctgagcgagttagataaggcaggatttattaaacgccagttagtggagactcgtcaaatcaccaaacatgtcgcgcagattttggacagccggatgaacaccaagtacgatgaaaatgacaaactgatccgtgaggtgaaagtcattactctgaagtccaaattagttagtgatttccggaaggactttcaattctacaaagtccgtgaaattaataactatcatcacgcacatgacgcgtacctgaatgcagtggttgggaccgcccttatcaagaaatatcctaagctggagtcggagtttgtctatggcgactataaggtatacgatgttcgcaaaatgattgcgaaatctgagcaggagatcggtaaggcaaccgcaaaatatttcttttactcaaacattatgaatttctttaagacagaaatcactctggccaacggggagattcgcaaacgtccgttgatcgaaacaaacggcgagactggcgaaattgtttgggacaaagggcgtgatttcgcgacggtgcgcaaggtactgagcatgcctcaagtcaatattgttaagaaaaccgaagtgcagacgggcgggttttccaaggaaagcatcttacccaaacgtaattcagataaacttattgcacgcaaaaaggactgggatccgaaaaagtatggaggcttcgacagtccaaccgtagcctactctgttctcgttgtagcgaaagtagaaaagggtaaatccaagaaactgaaatctgtcaaggagttgcttggaatcaccattatggagcgtagctccttcgagaagaacccgattgactttctggaagccaaaggatataaagaggtcaagaaagatcttatcattaagctgcctaagtattcactcttcgagctggaaaatggtcgtaaacgcatgctcgcttctgccggcgagttgcagaagggcaatgaattagcacttccatcaaagtacgttaacttcctgtatttggccagccattacgagaaactgaaggggtctccagaggacaacgaacagaaacaattatttgtagagcagcacaagcattatcttgatgaaatcattgagcaaatttccgaattcagtaaacgcgtaatcctggccgatgcaaacctcgacaaggtgctgagcgcttacaataagcatcgcgacaaacctatccgtgagcaggctgaaaatatcattcacctgttcacattaacgaacctgggcgctccggccgcttttaaatatttcgacacgacaatcgaccgtaagcgctataccagtacgaaagaagtgttggatgcgacccttattcaccagtcaattacaggattatatgagacccgtatcgaccttagccaattaggtggggatgcggccctgcccaagaagcggaagttcagcgagatcagcagctga

SEQ ID NO: 309 - DNA, 4149 bp, synthetic construct
  source 1..4149: mol_type = other DNA
atggacaaaaagtactctattggcctggatatcgggaccaacagcgtcgggtgggctgttatcaccgacgagtataaagtaccttcgaaaaagttcaaagtgctgggcaacaccgatcgccattcaatcaaaaagaacttgattggtgcgctgttgtttgactccggggaaaccgccgaggcgactcgccttaaacgtacagcacgtcgccggtacactcggcgtaagaatcgcatttgctatttgcaggaaatctttagcaacgagatggcaaaagtcgatgactcgtttttccaccgcctcgaggaaagctttctggtggaggaagacaaaaagcatgagcgtcacccgatcttcggcaacattgtcgatgaagtagcgtatcatgaaaaatacccaaccatttaccacttacgcaaaaagctggtggacagcactgacaaagctgatttgcgccttatctatttagccctggcacatatgattaagtttcgtggtcacttcctgatcgaaggagacttaaatcccgacaacagtgatgttgataaattgtttattcagcttgtccaaacttacaatcaactgttcgaggaaaacccgatcaatgcctccggtgtggatgcaaaagccattttaagtgcacgccttagcaagtcccgtcgcttagaaaaccttatcgcgcagctgcccggcgagaaaaagaatggtttgtttgggaaccttattgccttgagcttaggcctcaccccgaatttcaaaagtaatttcgatcttgcagaagacgccaaattacaactgtcgaaggatacttatgatgacgatctcgataatctgttagcgcagattggtgaccaatacgccgatctttttctggcggctaaaaatctgagcgacgccatcttgctttcggatattctccgcgttaacaccgaaatcacgaaagcgcctcttagtgccagcatgattaaacgttatgatgaacaccaccaggacctgaccttactcaaagcgttggttcgccagcaactgccagagaagtacaaagaaatcttctttgatcagtcaaagaatggttatgccggctatattgacgggggtgcaagccaagaggaattctacaaatttatcaagcctattctggagaaaatggatggcaccgaagagttattggtgaagcttaaccgtgaagacctcctgcggaaacagcgcacattcgataatggttcgatcccacaccaaatccatttgggggagttacacgctattttgcgtcgccaggaagacttttaccctttcctgaaggataaccgggagaaaattgagaagatccttacctttcgtattccgtattacgtaggccccttagcacggggtaatagccgtttcgcgtggatgacacggaagtcggaagagacgatcaccccgtggaacttcgaagaggtagtcgacaagggcgcatcagcgcagtcttttattgaacgtatgacgaatttcgataaaaacttgcccaatgagaaggtgcttccgaaacattccttgttatatgaatattttacagtttacaacgagctgaccaaggttaaatacgtgacggaaggaatgcgcaagcccgcttttcttagcggtgagcaaaaaaaggcgatcgtcgacctgttattcaaaacgaatcgtaaggtgactgtaaagcaactcaaagaagattacttcaaaaagattgagtgcttcgacagcgtcgaaatctctggggtagaggatcggtttaacgcaagtttaggtacctaccatgacctgcttaaaatcattaaggataaagacttcttagataatgaagagaacgaagatattctcgaggacatcgtcttgacgttaaccttatttgaggatcgtgaaatgattgaggaacgcctcaaaacttatgcccacctgttcgacgataaggtgatgaagcagctgaaacgtcggcgctacacaggatggggccgcttgagtcgcaaacttattaacggaatccgtgacaagcaatccggcaaaacgattctggatttcttgaagtcggacggatttgctaatcgcaacttcatgcagttgatccatgatgactccctgacttttaaagaggatattcaaaaggcgcaggttagtggtcaaggcgacagcttacacgaacacatcgcaaatttggctggttcgccggccattaaaaaggggatcctccagaccgtgaaagttgtagatgagcttgttaaggtcatgggtcgtcataagcccgaaaacatcgtgattgaaatggcgcgggagaatcaaacgacccagaaaggacaaaagaatagccgtgaacggatgaagcggatcgaggaaggcattaaagagctggggtctcaaatcttgaaggaacaccctgtggagaacactcagctccaaaatgaaaaactttacctgtactatttgcagaacggacgcgatatgtacgtggaccaagagttggatattaatcggctgagtgactacgacgttgatcatatcgtcccgcagagcttcctcaaagacgattctattgacaataaggtactgacgcgctctgataaaaaccgtggtaagtcggacaacgtgccctccgaagaggttgtgaaaaagatgaaaaattattggcgccagcttttaaacgcgaagctgatcacacaacgtaaattcgataatttgaccaaggctgaacggggtggcctgagcgagttagataaggcaggatttattaaacgccagttagtggagactcgtcaaatcaccaaacatgtcgcgcagattttggacagccggatgaacaccaagtacgatgaaaatgacaaactgatccgtgaggtgaaagtcattactctgaagtccaaattagttagtgatttccggaaggactttcaattctacaaagtccgtgaaattaataactatcatcacgcacatgacgcgtacctgaatgcagtggttgggaccgcccttatcaagaaatatcctaagctggagtcggagtttgtctatggcgactataaggtatacgatgttcgcaaaatgattgcgaaatctgagcaggagatcggtaaggcaaccgcaaaatatttcttttactcaaacattatgaatttctttaagacagaaatcactctggccaacggggagattcgcaaacgtccgttgatcgaaacaaacggcgagactggcgaaattgtttgggacaaagggcgtgatttcgcgacggtgcgcaaggtactgagcatgcctcaagtcaatattgttaagaaaaccgaagtgcagacgggcgggttttccaaggaaagcatcttacccaaacgtaattcagataaacttattgcacgcaaaaaggactgggatccgaaaaagtatggaggcttcgacagtccaaccgtagcctactctgttctcgttgtagcgaaagtagaaaagggtaaatccaagaaactgaaatctgtcaaggagttgcttggaatcaccattatggagcgtagctccttcgagaagaacccgattgactttctggaagccaaaggatataaagaggtcaagaaagatcttatcattaagctgcctaagtattcactcttcgagctggaaaatggtcgtaaacgcatgctcgcttctgccggcgagttgcagaagggcaatgaattagcacttccatcaaagtacgttaacttcctgtatttggccagccattacgagaaactgaaggggtctccagaggacaacgaacagaaacaattatttgtagagcagcacaagcattatcttgatgaaatcattgagcaaatttccgaattcagtaaacgcgtaatcctggccgatgcaaacctcgacaaggtgctgagcgcttacaataagcatcgcgacaaacctatccgtgagcaggctgaaaatatcattcacctgttcacattaacgaacctgggcgctccggccgcttttaaatatttcgacacgacaatcgaccgtaagcgctataccagtacgaaagaagtgttggatgcgacccttattcaccagtcaattacaggattatatgagacccgtatcgaccttagccaattaggtggggatgcggccctgagcggcaccaagagaaagcgggcctacttcatctga

SEQ ID NO: 310 - DNA, 4149 bp, synthetic construct
  source 1..4149: mol_type = other DNA
atggacaaaaagtactctattggcctggatatcgggaccaacagcgtcgggtgggctgttatcaccgacgagtataaagtaccttcgaaaaagttcaaagtgctgggcaacaccgatcgccattcaatcaaaaagaacttgattggtgcgctgttgtttgactccggggaaaccgccgaggcgactcgccttaaacgtacagcacgtcgccggtacactcggcgtaagaatcgcatttgctatttgcaggaaatctttagcaacgagatggcaaaagtcgatgactcgtttttccaccgcctcgaggaaagctttctggtggaggaagacaaaaagcatgagcgtcacccgatcttcggcaacattgtcgatgaagtagcgtatcatgaaaaatacccaaccatttaccacttacgcaaaaagctggtggacagcactgacaaagctgatttgcgccttatctatttagccctggcacatatgattaagtttcgtggtcacttcctgatcgaaggagacttaaatcccgacaacagtgatgttgataaattgtttattcagcttgtccaaacttacaatcaactgttcgaggaaaacccgatcaatgcctccggtgtggatgcaaaagccattttaagtgcacgccttagcaagtcccgtcgcttagaaaaccttatcgcgcagctgcccggcgagaaaaagaatggtttgtttgggaaccttattgccttgagcttaggcctcaccccgaatttcaaaagtaatttcgatcttgcagaagacgccaaattacaactgtcgaaggatacttatgatgacgatctcgataatctgttagcgcagattggtgaccaatacgccgatctttttctggcggctaaaaatctgagcgacgccatcttgctttcggatattctccgcgttaacaccgaaatcacgaaagcgcctcttagtgccagcatgattaaacgttatgatgaacaccaccaggacctgaccttactcaaagcgttggttcgccagcaactgccagagaagtacaaagaaatcttctttgatcagtcaaagaatggttatgccggctatattgacgggggtgcaagccaagaggaattctacaaatttatcaagcctattctggagaaaatggatggcaccgaagagttattggtgaagcttaaccgtgaagacctcctgcggaaacagcgcacattcgataatggttcgatcccacaccaaatccatttgggggagttacacgctattttgcgtcgccaggaagacttttaccctttcctgaaggataaccgggagaaaattgagaagatccttacctttcgtattccgtattacgtaggccccttagcacggggtaatagccgtttcgcgtggatgacacggaagtcggaagagacgatcaccccgtggaacttcgaagaggtagtcgacaagggcgcatcagcgcagtcttttattgaacgtatgacgaatttcgataaaaacttgcccaatgagaaggtgcttccgaaacattccttgttatatgaatattttacagtttacaacgagctgaccaaggttaaatacgtgacggaaggaatgcgcaagcccgcttttcttagcggtgagcaaaaaaaggcgatcgtcgacctgttattcaaaacgaatcgtaaggtgactgtaaagcaactcaaagaagattacttcaaaaagattgagtgcttcgacagcgtcgaaatctctggggtagaggatcggtttaacgcaagtttaggtacctaccatgacctgcttaaaatcattaaggataaagacttcttagataatgaagagaacgaagatattctcgaggacatcgtcttgacgttaaccttatttgaggatcgtgaaatgattgaggaacgcctcaaaacttatgcccacctgttcgacgataaggtgatgaagcagctgaaacgtcggcgctacacaggatggggccgcttgagtcgcaaacttattaacggaatccgtgacaagcaatccggcaaaacgattctggatttcttgaagtcggacggatttgctaatcgcaacttcatgcagttgatccatgatgactccctgacttttaaagaggatattcaaaaggcgcaggttagtggtcaaggcgacagcttacacgaacacatcgcaaatttggctggttcgccggccattaaaaaggggatcctccagaccgtgaaagttgtagatgagcttgttaaggtcatgggtcgtcataagcccgaaaacatcgtgattgaaatggcgcgggagaatcaaacgacccagaaaggacaaaagaatagccgtgaacggatgaagcggatcgaggaaggcattaaagagctggggtctcaaatcttgaaggaacaccctgtggagaacactcagctccaaaatgaaaaactttacctgtactatttgcagaacggacgcgatatgtacgtggaccaagagttggatattaatcggctgagtgactacgacgttgatcatatcgtcccgcagagcttcctcaaagacgattctattgacaataaggtactgacgcgctctgataaaaaccgtggtaagtcggacaacgtgccctccgaagaggttgtgaaaaagatgaaaaattattggcgccagcttttaaacgcgaagctgatcacacaacgtaaattcgataatttgaccaaggctgaacggggtggcctgagcgagttagataaggcaggatttattaaacgccagttagtggagactcgtcaaatcaccaaacatgtcgcgcagattttggacagccggatgaacaccaagtacgatgaaaatgacaaactgatccgtgaggtgaaagtcattactctgaagtccaaattagttagtgatttccggaaggactttcaattctacaaagtccgtgaaattaataactatcatcacgcacatgacgcgtacctgaatgcagtggttgggaccgcccttatcaagaaatatcctaagctggagtcggagtttgtctatggcgactataaggtatacgatgttcgcaaaatgattgcgaaatctgagcaggagatcggtaaggcaaccgcaaaatatttcttttactcaaacattatgaatttctttaagacagaaatcactctggccaacggggagattcgcaaacgtccgttgatcgaaacaaacggcgagactggcgaaattgtttgggacaaagggcgtgatttcgcgacggtgcgcaaggtactgagcatgcctcaagtcaatattgttaagaaaaccgaagtgcagacgggcgggttttccaaggaaagcatcttacccaaacgtaattcagataaacttattgcacgcaaaaaggactgggatccgaaaaagtatggaggcttcgacagtccaaccgtagcctactctgttctcgttgtagcgaaagtagaaaagggtaaatccaagaaactgaaatctgtcaaggagttgcttggaatcaccattatggagcgtagctccttcgagaagaacccgattgactttctggaagccaaaggatataaagaggtcaagaaagatcttatcattaagctgcctaagtattcactcttcgagctggaaaatggtcgtaaacgcatgctcgcttctgccggcgagttgcagaagggcaatgaattagcacttccatcaaagtacgttaacttcctgtatttggccagccattacgagaaactgaaggggtctccagaggacaacgaacagaaacaattatttgtagagcagcacaagcattatcttgatgaaatcattgagcaaatttccgaattcagtaaacgcgtaatcctggccgatgcaaacctcgacaaggtgctgagcgcttacaataagcatcgcgacaaacctatccgtgagcaggctgaaaatatcattcacctgttcacattaacgaacctgggcgctccggccgcttttaaatatttcgacacgacaatcgaccgtaagcgctataccagtacgaaagaagtgttggatgcgacccttattcaccagtcaattacaggattatatgagacccgtatcgaccttagccaattaggtggggatgcggcccccagcagaaagagaaagcgggatcactacgccgtgtga

SEQ ID NO: 311 - DNA, 4149 bp, synthetic construct
  source 1..4149: mol_type = other DNA
atggacaaaaagtactctattggcctggatatcgggaccaacagcgtcgggtgggctgttatcaccgacgagtataaagtaccttcgaaaaagttcaaagtgctgggcaacaccgatcgccattcaatcaaaaagaacttgattggtgcgctgttgtttgactccggggaaaccgccgaggcgactcgccttaaacgtacagcacgtcgccggtacactcggcgtaagaatcgcatttgctatttgcaggaaatctttagcaacgagatggcaaaagtcgatgactcgtttttccaccgcctcgaggaaagctttctggtggaggaagacaaaaagcatgagcgtcacccgatcttcggcaacattgtcgatgaagtagcgtatcatgaaaaatacccaaccatttaccacttacgcaaaaagctggtggacagcactgacaaagctgatttgcgccttatctatttagccctggcacatatgattaagtttcgtggtcacttcctgatcgaaggagacttaaatcccgacaacagtgatgttgataaattgtttattcagcttgtccaaacttacaatcaactgttcgaggaaaacccgatcaatgcctccggtgtggatgcaaaagccattttaagtgcacgccttagcaagtcccgtcgcttagaaaaccttatcgcgcagctgcccggcgagaaaaagaatggtttgtttgggaaccttattgccttgagcttaggcctcaccccgaatttcaaaagtaatttcgatcttgcagaagacgccaaattacaactgtcgaaggatacttatgatgacgatctcgataatctgttagcgcagattggtgaccaatacgccgatctttttctggcggctaaaaatctgagcgacgccatcttgctttcggatattctccgcgttaacaccgaaatcacgaaagcgcctcttagtgccagcatgattaaacgttatgatgaacaccaccaggacctgaccttactcaaagcgttggttcgccagcaactgccagagaagtacaaagaaatcttctttgatcagtcaaagaatggttatgccggctatattgacgggggtgcaagccaagaggaattctacaaatttatcaagcctattctggagaaaatggatggcaccgaagagttattggtgaagcttaaccgtgaagacctcctgcggaaacagcgcacattcgataatggttcgatcccacaccaaatccatttgggggagttacacgctattttgcgtcgccaggaagacttttaccctttcctgaaggataaccgggagaaaattgagaagatccttacctttcgtattccgtattacgtaggccccttagcacggggtaatagccgtttcgcgtggatgacacggaagtcggaagagacgatcaccccgtggaacttcgaagaggtagtcgacaagggcgcatcagcgcagtcttttattgaacgtatgacgaatttcgataaaaacttgcccaatgagaaggtgcttccgaaacattccttgttatatgaatattttacagtttacaacgagctgaccaaggttaaatacgtgacggaaggaatgcgcaagcccgcttttcttagcggtgagcaaaaaaaggcgatcgtcgacctgttattcaaaacgaatcgtaaggtgactgtaaagcaactcaaagaagattacttcaaaaagattgagtgcttcgacagcgtcgaaatctctggggtagaggatcggtttaacgcaagtttaggtacctaccatgacctgcttaaaatcattaaggataaagacttcttagataatgaagagaacgaagatattctcgaggacatcgtcttgacgttaaccttatttgaggatcgtgaaatgattgaggaacgcctcaaaacttatgcccacctgttcgacgataaggtgatgaagcagctgaaacgtcggcgctacacaggatggggccgcttgagtcgcaaacttattaacggaatccgtgacaagcaatccggcaaaacgattctggatttcttgaagtcggacggatttgctaatcgcaacttcatgcagttgatccatgatgactccctgacttttaaagaggatattcaaaaggcgcaggttagtggtcaaggcgacagcttacacgaacacatcgcaaatttggctggttcgccggccattaaaaaggggatcctccagaccgtgaaagttgtagatgagcttgttaaggtcatgggtcgtcataagcccgaaaacatcgtgattgaaatggcgcgggagaatcaaacgacccagaaaggacaaaagaatagccgtgaacggatgaagcggatcgaggaaggcattaaagagctggggtctcaaatcttgaaggaacaccctgtggagaacactcagctccaaaatgaaaaactttacctgtactatttgcagaacggacgcgatatgtacgtggaccaagagttggatattaatcggctgagtgactacgacgttgatcatatcgtcccgcagagcttcctcaaagacgattctattgacaataaggtactgacgcgctctgataaaaaccgtggtaagtcggacaacgtgccctccgaagaggttgtgaaaaagatgaaaaattattggcgccagcttttaaacgcgaagctgatcacacaacgtaaattcgataatttgaccaaggctgaacggggtggcctgagcgagttagataaggcaggatttattaaacgccagttagtggagactcgtcaaatcaccaaacatgtcgcgcagattttggacagccggatgaacaccaagtacgatgaaaatgacaaactgatccgtgaggtgaaagtcattactctgaagtccaaattagttagtgatttccggaaggactttcaattctacaaagtccgtgaaattaataactatcatcacgcacatgacgcgtacctgaatgcagtggttgggaccgcccttatcaagaaatatcctaagctggagtcggagtttgtctatggcgactataaggtatacgatgttcgcaaaatgattgcgaaatctgagcaggagatcggtaaggcaaccgcaaaatatttcttttactcaaacattatgaatttctttaagacagaaatcactctggccaacggggagattcgcaaacgtccgttgatcgaaacaaacggcgagactggcgaaattgtttgggacaaagggcgtgatttcgcgacggtgcgcaaggtactgagcatgcctcaagtcaatattgttaagaaaaccgaagtgcagacgggcgggttttccaaggaaagcatcttacccaaacgtaattcagataaacttattgcacgcaaaaaggactgggatccgaaaaagtatggaggcttcgacagtccaaccgtagcctactctgttctcgttgtagcgaaagtagaaaagggtaaatccaagaaactgaaatctgtcaaggagttgcttggaatcaccattatggagcgtagctccttcgagaagaacccgattgactttctggaagccaaaggatataaagaggtcaagaaagatcttatcattaagctgcctaagtattcactcttcgagctggaaaatggtcgtaaacgcatgctcgcttctgccggcgagttgcagaagggcaatgaattagcacttccatcaaagtacgttaacttcctgtatttggccagccattacgagaaactgaaggggtctccagaggacaacgaacagaaacaattatttgtagagcagcacaagcattatcttgatgaaatcattgagcaaatttccgaattcagtaaacgcgtaatcctggccgatgcaaacctcgacaaggtgctgagcgcttacaataagcatcgcgacaaacctatccgtgagcaggctgaaaatatcattcacctgttcacattaacgaacctgggcgctccggccgcttttaaatatttcgacacgacaatcgaccgtaagcgctataccagtacgaaagaagtgttggatgcgacccttattcaccagtcaattacaggattatatgagacccgtatcgaccttagccaattaggtggggatgcggccgagcccaatcctcggaagagaaagagaagcgagctgtga

SEQ ID NO: 312 - DNA, 4149 bp, synthetic construct
  source 1..4149: mol_type = other DNA
atggacaaaaagtactctattggcctggatatcgggaccaacagcgtcgggtgggctgttatcaccgacgagtataaagtaccttcgaaaaagttcaaagtgctgggcaacaccgatcgccattcaatcaaaaagaacttgattggtgcgctgttgtttgactccggggaaaccgccgaggcgactcgccttaaacgtacagcacgtcgccggtacactcggcgtaagaatcgcatttgctatttgcaggaaatctttagcaacgagatggcaaaagtcgatgactcgtttttccaccgcctcgaggaaagctttctggtggaggaagacaaaaagcatgagcgtcacccgatcttcggcaacattgtcgatgaagtagcgtatcatgaaaaatacccaaccatttaccacttacgcaaaaagctggtggacagcactgacaaagctgatttgcgccttatctatttagccctggcacatatgattaagtttcgtggtcacttcctgatcgaaggagacttaaatcccgacaacagtgatgttgataaattgtttattcagcttgtccaaacttacaatcaactgttcgaggaaaacccgatcaatgcctccggtgtggatgcaaaagccattttaagtgcacgccttagcaagtcccgtcgcttagaaaaccttatcgcgcagctgcccggcgagaaaaagaatggtttgtttgggaaccttattgccttgagcttaggcctcaccccgaatttcaaaagtaatttcgatcttgcagaagacgccaaattacaactgtcgaaggatacttatgatgacgatctcgataatctgttagcgcagattggtgaccaatacgccgatctttttctggcggctaaaaatctgagcgacgccatcttgctttcggatattctccgcgttaacaccgaaatcacgaaagcgcctcttagtgccagcatgattaaacgttatgatgaacaccaccaggacctgaccttactcaaagcgttggttcgccagcaactgccagagaagtacaaagaaatcttctttgatcagtcaaagaatggttatgccggctatattgacgggggtgcaagccaagaggaattctacaaatttatcaagcctattctggagaaaatggatggcaccgaagagttattggtgaagcttaaccgtgaagacctcctgcggaaacagcgcacattcgataatggttcgatcccacaccaaatccatttgggggagttacacgctattttgcgtcgccaggaagacttttaccctttcctgaaggataaccgggagaaaattgagaagatccttacctttcgtattccgtattacgtaggccccttagcacggggtaatagccgtttcgcgtggatgacacggaagtcggaagagacgatcaccccgtggaacttcgaagaggtagtcgacaagggcgcatcagcgcagtcttttattgaacgtatgacgaatttcgataaaaacttgcccaatgagaaggtgcttccgaaacattccttgttatatgaatattttacagtttacaacgagctgaccaaggttaaatacgtgacggaaggaatgcgcaagcccgcttttcttagcggtgagcaaaaaaaggcgatcgtcgacctgttattcaaaacgaatcgtaaggtgactgtaaagcaactcaaagaagattacttcaaaaagattgagtgcttcgacagcgtcgaaatctctggggtagaggatcggtttaacgcaagtttaggtacctaccatgacctgcttaaaatcattaaggataaagacttcttagataatgaagagaacgaagatattctcgaggacatcgtcttgacgttaaccttatttgaggatcgtgaaatgattgaggaacgcctcaaaacttatgcccacctgttcgacgataaggtgatgaagcagctgaaacgtcggcgctacacaggatggggccgcttgagtcgcaaacttattaacggaatccgtgacaagcaatccggcaaaacgattctggatttcttgaagtcggacggatttgctaatcgcaacttcatgcagttgatccatgatgactccctgacttttaaagaggatattcaaaaggcgcaggttagtggtcaaggcgacagcttacacgaacacatcgcaaatttggctggttcgccggccattaaaaaggggatcctccagaccgtgaaagttgtagatgagcttgttaaggtcatgggtcgtcataagcccgaaaacatcgtgattgaaatggcgcgggagaatcaaacgacccagaaaggacaaaagaatagccgtgaacggatgaagcggatcgaggaaggcattaaagagctggggtctcaaatcttgaaggaacaccctgtggagaacactcagctccaaaatgaaaaactttacctgtactatttgcagaacggacgcgatatgtacgtggaccaagagttggatattaatcggctgagtgactacgacgttgatcatatcgtcccgcagagcttcctcaaagacgattctattgacaataaggtactgacgcgctctgataaaaaccgtggtaagtcggacaacgtgccctccgaagaggttgtgaaaaagatgaaaaattattggcgccagcttttaaacgcgaagctgatcacacaacgtaaattcgataatttgaccaaggctgaacggggtggcctgagcgagttagataaggcaggatttattaaacgccagttagtggagactcgtcaaatcaccaaacatgtcgcgcagattttggacagccggatgaacaccaagtacgatgaaaatgacaaactgatccgtgaggtgaaagtcattactctgaagtccaaattagttagtgatttccggaaggactttcaattctacaaagtccgtgaaattaataactatcatcacgcacatgacgcgtacctgaatgcagtggttgggaccgcccttatcaagaaatatcctaagctggagtcggagtttgtctatggcgactataaggtatacgatgttcgcaaaatgattgcgaaatctgagcaggagatcggtaaggcaaccgcaaaatatttcttttactcaaacattatgaatttctttaagacagaaatcactctggccaacggggagattcgcaaacgtccgttgatcgaaacaaacggcgagactggcgaaattgtttgggacaaagggcgtgatttcgcgacggtgcgcaaggtactgagcatgcctcaagtcaatattgttaagaaaaccgaagtgcagacgggcgggttttccaaggaaagcatcttacccaaacgtaattcagataaacttattgcacgcaaaaaggactgggatccgaaaaagtatggaggcttcgacagtccaaccgtagcctactctgttctcgttgtagcgaaagtagaaaagggtaaatccaagaaactgaaatctgtcaaggagttgcttggaatcaccattatggagcgtagctccttcgagaagaacccgattgactttctggaagccaaaggatataaagaggtcaagaaagatcttatcattaagctgcctaagtattcactcttcgagctggaaaatggtcgtaaacgcatgctcgcttctgccggcgagttgcagaagggcaatgaattagcacttccatcaaagtacgttaacttcctgtatttggccagccattacgagaaactgaaggggtctccagaggacaacgaacagaaacaattatttgtagagcagcacaagcattatcttgatgaaatcattgagcaaatttccgaattcagtaaacgcgtaatcctggccgatgcaaacctcgacaaggtgctgagcgcttacaataagcatcgcgacaaacctatccgtgagcaggctgaaaatatcattcacctgttcacattaacgaacctgggcgctccggccgcttttaaatatttcgacacgacaatcgaccgtaagcgctataccagtacgaaagaagtgttggatgcgacccttattcaccagtcaattacaggattatatgagacccgtatcgaccttagccaattaggtggggatgcggcccctatcctgcctctgaagagaagaagaggcagcccctga

SEQ ID NO: 313 - DNA, 4149 bp, synthetic construct
  source 1..4149: mol_type = other DNA
atggacaaaaagtactctattggcctggatatcgggaccaacagcgtcgggtgggctgttatcaccgacgagtataaagtaccttcgaaaaagttcaaagtgctgggcaacaccgatcgccattcaatcaaaaagaacttgattggtgcgctgttgtttgactccggggaaaccgccgaggcgactcgccttaaacgtacagcacgtcgccggtacactcggcgtaagaatcgcatttgctatttgcaggaaatctttagcaacgagatggcaaaagtcgatgactcgtttttccaccgcctcgaggaaagctttctggtggaggaagacaaaaagcatgagcgtcacccgatcttcggcaacattgtcgatgaagtagcgtatcatgaaaaatacccaaccatttaccacttacgcaaaaagctggtggacagcactgacaaagctgatttgcgccttatctatttagccctggcacatatgattaagtttcgtggtcacttcctgatcgaaggagacttaaatcccgacaacagtgatgttgataaattgtttattcagcttgtccaaacttacaatcaactgttcgaggaaaacccgatcaatgcctccggtgtggatgcaaaagccattttaagtgcacgccttagcaagtcccgtcgcttagaaaaccttatcgcgcagctgcccggcgagaaaaagaatggtttgtttgggaaccttattgccttgagcttaggcctcaccccgaatttcaaaagtaatttcgatcttgcagaagacgccaaattacaactgtcgaaggatacttatgatgacgatctcgataatctgttagcgcagattggtgaccaatacgccgatctttttctggcggctaaaaatctgagcgacgccatcttgctttcggatattctccgcgttaacaccgaaatcacgaaagcgcctcttagtgccagcatgattaaacgttatgatgaacaccaccaggacctgaccttactcaaagcgttggttcgccagcaactgccagagaagtacaaagaaatcttctttgatcagtcaaagaatggttatgccggctatattgacgggggtgcaagccaagaggaattctacaaatttatcaagcctattctggagaaaatggatggcaccgaagagttattggtgaagcttaaccgtgaagacctcctgcggaaacagcgcacattcgataatggttcgatcccacaccaaatccatttgggggagttacacgctattttgcgtcgccaggaagacttttaccctttcctgaaggataaccgggagaaaattgagaagatccttacctttcgtattccgtattacgtaggccccttagcacggggtaatagccgtttcgcgtggatgacacggaagtcggaagagacgatcaccccgtggaacttcgaagaggtagtcgacaagggcgcatcagcgcagtcttttattgaacgtatgacgaatttcgataaaaacttgcccaatgagaaggtgcttccgaaacattccttgttatatgaatattttacagtttacaacgagctgaccaaggttaaatacgtgacggaaggaatgcgcaagcccgcttttcttagcggtgagcaaaaaaaggcgatcgtcgacctgttattcaaaacgaatcgtaaggtgactgtaaagcaactcaaagaagattacttcaaaaagattgagtgcttcgacagcgtcgaaatctctggggtagaggatcggtttaacgcaagtttaggtacctaccatgacctgcttaaaatcattaaggataaagacttcttagataatgaagagaacgaagatattctcgaggacatcgtcttgacgttaaccttatttgaggatcgtgaaatgattgaggaacgcctcaaaacttatgcccacctgttcgacgataaggtgatgaagcagctgaaacgtcggcgctacacaggatggggccgcttgagtcgcaaacttattaacggaatccgtgacaagcaatccggcaaaacgattctggatttcttgaagtcggacggatttgctaatcgcaacttcatgcagttgatccatgatgactccctgacttttaaagaggatattcaaaaggcgcaggttagtggtcaaggcgacagcttacacgaacacatcgcaaatttggctggttcgccggccattaaaaaggggatcctccagaccgtgaaagttgtagatgagcttgttaaggtcatgggtcgtcataagcccgaaaacatcgtgattgaaatggcgcgggagaatcaaacgacccagaaaggacaaaagaatagccgtgaacggatgaagcggatcgaggaaggcattaaagagctggggtctcaaatcttgaaggaacaccctgtggagaacactcagctccaaaatgaaaaactttacctgtactatttgcagaacggacgcgatatgtacgtggaccaagagttggatattaatcggctgagtgactacgacgttgatcatatcgtcccgcagagcttcctcaaagacgattctattgacaataaggtactgacgcgctctgataaaaaccgtggtaagtcggacaacgtgccctccgaagaggttgtgaaaaagatgaaaaattattggcgccagcttttaaacgcgaagctgatcacacaacgtaaattcgataatttgaccaaggctgaacggggtggcctgagcgagttagataaggcaggatttattaaacgccagttagtggagactcgtcaaatcaccaaacatgtcgcgcagattttggacagccggatgaacaccaagtacgatgaaaatgacaaactgatccgtgaggtgaaagtcattactctgaagtccaaattagttagtgatttccggaaggactttcaattctacaaagtccgtgaaattaataactatcatcacgcacatgacgcgtacctgaatgcagtggttgggaccgcccttatcaagaaatatcctaagctggagtcggagtttgtctatggcgactataaggtatacgatgttcgcaaaatgattgcgaaatctgagcaggagatcggtaaggcaaccgcaaaatatttcttttactcaaacattatgaatttctttaagacagaaatcactctggccaacggggagattcgcaaacgtccgttgatcgaaacaaacggcgagactggcgaaattgtttgggacaaagggcgtgatttcgcgacggtgcgcaaggtactgagcatgcctcaagtcaatattgttaagaaaaccgaagtgcagacgggcgggttttccaaggaaagcatcttacccaaacgtaattcagataaacttattgcacgcaaaaaggactgggatccgaaaaagtatggaggcttcgacagtccaaccgtagcctactctgttctcgttgtagcgaaagtagaaaagggtaaatccaagaaactgaaatctgtcaaggagttgcttggaatcaccattatggagcgtagctccttcgagaagaacccgattgactttctggaagccaaaggatataaagaggtcaagaaagatcttatcattaagctgcctaagtattcactcttcgagctggaaaatggtcgtaaacgcatgctcgcttctgccggcgagttgcagaagggcaatgaattagcacttccatcaaagtacgttaacttcctgtatttggccagccattacgagaaactgaaggggtctccagaggacaacgaacagaaacaattatttgtagagcagcacaagcattatcttgatgaaatcattgagcaaatttccgaattcagtaaacgcgtaatcctggccgatgcaaacctcgacaaggtgctgagcgcttacaataagcatcgcgacaaacctatccgtgagcaggctgaaaatatcattcacctgttcacattaacgaacctgggcgctccggccgcttttaaatatttcgacacgacaatcgaccgtaagcgctataccagtacgaaagaagtgttggatgcgacccttattcaccagtcaattacaggattatatgagacccgtatcgaccttagccaattaggtggggatgcggcccagatcggcaagaagcggaagagagactacctggactga

SEQ ID NO: 314 - DNA, 4149 bp, synthetic construct
  source 1..4149: mol_type = other DNA
atggacaaaaagtactctattggcctggatatcgggaccaacagcgtcgggtgggctgttatcaccgacgagtataaagtaccttcgaaaaagttcaaagtgctgggcaacaccgatcgccattcaatcaaaaagaacttgattggtgcgctgttgtttgactccggggaaaccgccgaggcgactcgccttaaacgtacagcacgtcgccggtacactcggcgtaagaatcgcatttgctatttgcaggaaatctttagcaacgagatggcaaaagtcgatgactcgtttttccaccgcctcgaggaaagctttctggtggaggaagacaaaaagcatgagcgtcacccgatcttcggcaacattgtcgatgaagtagcgtatcatgaaaaatacccaaccatttaccacttacgcaaaaagctggtggacagcactgacaaagctgatttgcgccttatctatttagccctggcacatatgattaagtttcgtggtcacttcctgatcgaaggagacttaaatcccgacaacagtgatgttgataaattgtttattcagcttgtccaaacttacaatcaactgttcgaggaaaacccgatcaatgcctccggtgtggatgcaaaagccattttaagtgcacgccttagcaagtcccgtcgcttagaaaaccttatcgcgcagctgcccggcgagaaaaagaatggtttgtttgggaaccttattgccttgagcttaggcctcaccccgaatttcaaaagtaatttcgatcttgcagaagacgccaaattacaactgtcgaaggatacttatgatgacgatctcgataatctgttagcgcagattggtgaccaatacgccgatctttttctggcggctaaaaatctgagcgacgccatcttgctttcggatattctccgcgttaacaccgaaatcacgaaagcgcctcttagtgccagcatgattaaacgttatgatgaacaccaccaggacctgaccttactcaaagcgttggttcgccagcaactgccagagaagtacaaagaaatcttctttgatcagtcaaagaatggttatgccggctatattgacgggggtgcaagccaagaggaattctacaaatttatcaagcctattctggagaaaatggatggcaccgaagagttattggtgaagcttaaccgtgaagacctcctgcggaaacagcgcacattcgataatggttcgatcccacaccaaatccatttgggggagttacacgctattttgcgtcgccaggaagacttttaccctttcctgaaggataaccgggagaaaattgagaagatccttacctttcgtattccgtattacgtaggccccttagcacggggtaatagccgtttcgcgtggatgacacggaagtcggaagagacgatcaccccgtggaacttcgaagaggtagtcgacaagggcgcatcagcgcagtcttttattgaacgtatgacgaatttcgataaaaacttgcccaatgagaaggtgcttccgaaacattccttgttatatgaatattttacagtttacaacgagctgaccaaggttaaatacgtgacggaaggaatgcgcaagcccgcttttcttagcggtgagcaaaaaaaggcgatcgtcgacctgttattcaaaacgaatcgtaaggtgactgtaaagcaactcaaagaagattacttcaaaaagattgagtgcttcgacagcgtcgaaatctctggggtagaggatcggtttaacgcaagtttaggtacctaccatgacctgcttaaaatcattaaggataaagacttcttagataatgaagagaacgaagatattctcgaggacatcgtcttgacgttaaccttatttgaggatcgtgaaatgattgaggaacgcctcaaaacttatgcccacctgttcgacgataaggtgatgaagcagctgaaacgtcggcgctacacaggatggggccgcttgagtcgcaaacttattaacggaatccgtgacaagcaatccggcaaaacgattctggatttcttgaagtcggacggatttgctaatcgcaacttcatgcagttgatccatgatgactccctgacttttaaagaggatattcaaaaggcgcaggttagtggtcaaggcgacagcttacacgaacacatcgcaaatttggctggttcgccggccattaaaaaggggatcctccagaccgtgaaagttgtagatgagcttgttaaggtcatgggtcgtcataagcccgaaaacatcgtgattgaaatggcgcgggagaatcaaacgacccagaaaggacaaaagaatagccgtgaacggatgaagcggatcgaggaaggcattaaagagctggggtctcaaatcttgaaggaacaccctgtggagaacactcagctccaaaatgaaaaactttacctgtactatttgcagaacggacgcgatatgtacgtggaccaagagttggatattaatcggctgagtgactacgacgttgatcatatcgtcccgcagagcttcctcaaagacgattctattgacaataaggtactgacgcgctctgataaaaaccgtggtaagtcggacaacgtgccctccgaagaggttgtgaaaaagatgaaaaattattggcgccagcttttaaacgcgaagctgatcacacaacgtaaattcgataatttgaccaaggctgaacggggtggcctgagcgagttagataaggcaggatttattaaacgccagttagtggagactcgtcaaatcaccaaacatgtcgcgcagattttggacagccggatgaacaccaagtacgatgaaaatgacaaactgatccgtgaggtgaaagtcattactctgaagtccaaattagttagtgatttccggaaggactttcaattctacaaagtccgtgaaattaataactatcatcacgcacatgacgcgtacctgaatgcagtggttgggaccgcccttatcaagaaatatcctaagctggagtcggagtttgtctatggcgactataaggtatacgatgttcgcaaaatgattgcgaaatctgagcaggagatcggtaaggcaaccgcaaaatatttcttttactcaaacattatgaatttctttaagacagaaatcactctggccaacggggagattcgcaaacgtccgttgatcgaaacaaacggcgagactggcgaaattgtttgggacaaagggcgtgatttcgcgacggtgcgcaaggtactgagcatgcctcaagtcaatattgttaagaaaaccgaagtgcagacgggcgggttttccaaggaaagcatcttacccaaacgtaattcagataaacttattgcacgcaaaaaggactgggatccgaaaaagtatggaggcttcgacagtccaaccgtagcctactctgttctcgttgtagcgaaagtagaaaagggtaaatccaagaaactgaaatctgtcaaggagttgcttggaatcaccattatggagcgtagctccttcgagaagaacccgattgactttctggaagccaaaggatataaagaggtcaagaaagatcttatcattaagctgcctaagtattcactcttcgagctggaaaatggtcgtaaacgcatgctcgcttctgccggcgagttgcagaagggcaatgaattagcacttccatcaaagtacgttaacttcctgtatttggccagccattacgagaaactgaaggggtctccagaggacaacgaacagaaacaattatttgtagagcagcacaagcattatcttgatgaaatcattgagcaaatttccgaattcagtaaacgcgtaatcctggccgatgcaaacctcgacaaggtgctgagcgcttacaataagcatcgcgacaaacctatccgtgagcaggctgaaaatatcattcacctgttcacattaacgaacctgggcgctccggccgcttttaaatatttcgacacgacaatcgaccgtaagcgctataccagtacgaaagaagtgttggatgcgacccttattcaccagtcaattacaggattatatgagacccgtatcgaccttagccaattaggtggggatgcggccccctccagaaagcggaagagagagagcgaccacatctga

SEQ ID NO: 315 - DNA, 4149 bp, synthetic construct
  source 1..4149: mol_type = other DNA
atggacaaaaagtactctattggcctggatatcgggaccaacagcgtcgggtgggctgttatcaccgacgagtataaagtaccttcgaaaaagttcaaagtgctgggcaacaccgatcgccattcaatcaaaaagaacttgattggtgcgctgttgtttgactccggggaaaccgccgaggcgactcgccttaaacgtacagcacgtcgccggtacactcggcgtaagaatcgcatttgctatttgcaggaaatctttagcaacgagatggcaaaagtcgatgactcgtttttccaccgcctcgaggaaagctttctggtggaggaagacaaaaagcatgagcgtcacccgatcttcggcaacattgtcgatgaagtagcgtatcatgaaaaatacccaaccatttaccacttacgcaaaaagctggtggacagcactgacaaagctgatttgcgccttatctatttagccctggcacatatgattaagtttcgtggtcacttcctgatcgaaggagacttaaatcccgacaacagtgatgttgataaattgtttattcagcttgtccaaacttacaatcaactgttcgaggaaaacccgatcaatgcctccggtgtggatgcaaaagccattttaagtgcacgccttagcaagtcccgtcgcttagaaaaccttatcgcgcagctgcccggcgagaaaaagaatggtttgtttgggaaccttattgccttgagcttaggcctcaccccgaatttcaaaagtaatttcgatcttgcagaagacgccaaattacaactgtcgaaggatacttatgatgacgatctcgataatctgttagcgcagattggtgaccaatacgccgatctttttctggcggctaaaaatctgagcgacgccatcttgctttcggatattctccgcgttaacaccgaaatcacgaaagcgcctcttagtgccagcatgattaaacgttatgatgaacaccaccaggacctgaccttactcaaagcgttggttcgccagcaactgccagagaagtacaaagaaatcttctttgatcagtcaaagaatggttatgccggctatattgacgggggtgcaagccaagaggaattctacaaatttatcaagcctattctggagaaaatggatggcaccgaagagttattggtgaagcttaaccgtgaagacctcctgcggaaacagcgcacattcgataatggttcgatcccacaccaaatccatttgggggagttacacgctattttgcgtcgccaggaagacttttaccctttcctgaaggataaccgggagaaaattgagaagatccttacctttcgtattccgtattacgtaggccccttagcacggggtaatagccgtttcgcgtggatgacacggaagtcggaagagacgatcaccccgtggaacttcgaagaggtagtcgacaagggcgcatcagcgcagtcttttattgaacgtatgacgaatttcgataaaaacttgcccaatgagaaggtgcttccgaaacattccttgttatatgaatattttacagtttacaacgagctgaccaaggttaaatacgtgacggaaggaatgcgcaagcccgcttttcttagcggtgagcaaaaaaaggcgatcgtcgacctgttattcaaaacgaatcgtaaggtgactgtaaagcaactcaaagaagattacttcaaaaagattgagtgcttcgacagcgtcgaaatctctggggtagaggatcggtttaacgcaagtttaggtacctaccatgacctgcttaaaatcattaaggataaagacttcttagataatgaagagaacgaagatattctcgaggacatcgtcttgacgttaaccttatttgaggatcgtgaaatgattgaggaacgcctcaaaacttatgcccacctgttcgacgataaggtgatgaagcagctgaaacgtcggcgctacacaggatggggccgcttgagtcgcaaacttattaacggaatccgtgacaagcaatccggcaaaacgattctggatttcttgaagtcggacggatttgctaatcgcaacttcatgcagttgatccatgatgactccctgacttttaaagaggatattcaaaaggcgcaggttagtggtcaaggcgacagcttacacgaacacatcgcaaatttggctggttcgccggccattaaaaaggggatcctccagaccgtgaaagttgtagatgagcttgttaaggtcatgggtcgtcataagcccgaaaacatcgtgattgaaatggcgcgggagaatcaaacgacccagaaaggacaaaagaatagccgtgaacggatgaagcggatcgaggaaggcattaaagagctggggtctcaaatcttgaaggaacaccctgtggagaacactcagctccaaaatgaaaaactttacctgtactatttgcagaacggacgcgatatgtacgtggaccaagagttggatattaatcggctgagtgactacgacgttgatcatatcgtcccgcagagcttcctcaaagacgattctattgacaataaggtactgacgcgctctgataaaaaccgtggtaagtcggacaacgtgccctccgaagaggttgtgaaaaagatgaaaaattattggcgccagcttttaaacgcgaagctgatcacacaacgtaaattcgataatttgaccaaggctgaacggggtggcctgagcgagttagataaggcaggatttattaaacgccagttagtggagactcgtcaaatcaccaaacatgtcgcgcagattttggacagccggatgaacaccaagtacgatgaaaatgacaaactgatccgtgaggtgaaagtcattactctgaagtccaaattagttagtgatttccggaaggactttcaattctacaaagtccgtgaaattaataactatcatcacgcacatgacgcgtacctgaatgcagtggttgggaccgcccttatcaagaaatatcctaagctggagtcggagtttgtctatggcgactataaggtatacgatgttcgcaaaatgattgcgaaatctgagcaggagatcggtaaggcaaccgcaaaatatttcttttactcaaacattatgaatttctttaagacagaaatcactctggccaacggggagattcgcaaacgtccgttgatcgaaacaaacggcgagactggcgaaattgtttgggacaaagggcgtgatttcgcgacggtgcgcaaggtactgagcatgcctcaagtcaatattgttaagaaaaccgaagtgcagacgggcgggttttccaaggaaagcatcttacccaaacgtaattcagataaacttattgcacgcaaaaaggactgggatccgaaaaagtatggaggcttcgacagtccaaccgtagcctactctgttctcgttgtagcgaaagtagaaaagggtaaatccaagaaactgaaatctgtcaaggagttgcttggaatcaccattatggagcgtagctccttcgagaagaacccgattgactttctggaagccaaaggatataaagaggtcaagaaagatcttatcattaagctgcctaagtattcactcttcgagctggaaaatggtcgtaaacgcatgctcgcttctgccggcgagttgcagaagggcaatgaattagcacttccatcaaagtacgttaacttcctgtatttggccagccattacgagaaactgaaggggtctccagaggacaacgaacagaaacaattatttgtagagcagcacaagcattatcttgatgaaatcattgagcaaatttccgaattcagtaaacgcgtaatcctggccgatgcaaacctcgacaaggtgctgagcgcttacaataagcatcgcgacaaacctatccgtgagcaggctgaaaatatcattcacctgttcacattaacgaacctgggcgctccggccgcttttaaatatttcgacacgacaatcgaccgtaagcgctataccagtacgaaagaagtgttggatgcgacccttattcaccagtcaattacaggattatatgagacccgtatcgaccttagccaattaggtggggatgcggccaagcggggcaagagaaaaagactcgtgcggccttggtga

SEQ ID NO: 316 - DNA, 4149 bp, synthetic construct
  source 1..4149: mol_type = other DNA
atggacaaaaagtactctattggcctggatatcgggaccaacagcgtcgggtgggctgttatcaccgacgagtataaagtaccttcgaaaaagttcaaagtgctgggcaacaccgatcgccattcaatcaaaaagaacttgattggtgcgctgttgtttgactccggggaaaccgccgaggcgactcgccttaaacgtacagcacgtcgccggtacactcggcgtaagaatcgcatttgctatttgcaggaaatctttagcaacgagatggcaaaagtcgatgactcgtttttccaccgcctcgaggaaagctttctggtggaggaagacaaaaagcatgagcgtcacccgatcttcggcaacattgtcgatgaagtagcgtatcatgaaaaatacccaaccatttaccacttacgcaaaaagctggtggacagcactgacaaagctgatttgcgccttatctatttagccctggcacatatgattaagtttcgtggtcacttcctgatcgaaggagacttaaatcccgacaacagtgatgttgataaattgtttattcagcttgtccaaacttacaatcaactgttcgaggaaaacccgatcaatgcctccggtgtggatgcaaaagccattttaagtgcacgccttagcaagtcccgtcgcttagaaaaccttatcgcgcagctgcccggcgagaaaaagaatggtttgtttgggaaccttattgccttgagcttaggcctcaccccgaatttcaaaagtaatttcgatcttgcagaagacgccaaattacaactgtcgaaggatacttatgatgacgatctcgataatctgttagcgcagattggtgaccaatacgccgatctttttctggcggctaaaaatctgagcgacgccatcttgctttcggatattctccgcgttaacaccgaaatcacgaaagcgcctcttagtgccagcatgattaaacgttatgatgaacaccaccaggacctgaccttactcaaagcgttggttcgccagcaactgccagagaagtacaaagaaatcttctttgatcagtcaaagaatggttatgccggctatattgacgggggtgcaagccaagaggaattctacaaatttatcaagcctattctggagaaaatggatggcaccgaagagttattggtgaagcttaaccgtgaagacctcctgcggaaacagcgcacattcgataatggttcgatcccacaccaaatccatttgggggagttacacgctattttgcgtcgccaggaagacttttaccctttcctgaaggataaccgggagaaaattgagaagatccttacctttcgtattccgtattacgtaggccccttagcacggggtaatagccgtttcgcgtggatgacacggaagtcggaagagacgatcaccccgtggaacttcgaagaggtagtcgacaagggcgcatcagcgcagtcttttattgaacgtatgacgaatttcgataaaaacttgcccaatgagaaggtgcttccgaaacattccttgttatatgaatattttacagtttacaacgagctgaccaaggttaaatacgtgacggaaggaatgcgcaagcccgcttttcttagcggtgagcaaaaaaaggcgatcgtcgacctgttattcaaaacgaatcgtaaggtgactgtaaagcaactcaaagaagattacttcaaaaagattgagtgcttcgacagcgtcgaaatctctggggtagaggatcggtttaacgcaagtttaggtacctaccatgacctgcttaaaatcattaaggataaagacttcttagataatgaagagaacgaagatattctcgaggacatcgtcttgacgttaaccttatttgaggatcgtgaaatgattgaggaacgcctcaaaacttatgcccacctgttcgacgataaggtgatgaagcagctgaaacgtcggcgctacacaggatggggccgcttgagtcgcaaacttattaacggaatccgtgacaagcaatccggcaaaacgattctggatttcttgaagtcggacggatttgctaatcgcaacttcatgcagttgatccatgatgactccctgacttttaaagaggatattcaaaaggcgcaggttagtggtcaaggcgacagcttacacgaacacatcgcaaatttggctggttcgccggccattaaaaaggggatcctccagaccgtgaaagttgtagatgagcttgttaaggtcatgggtcgtcataagcccgaaaacatcgtgattgaaatggcgcgggagaatcaaacgacccagaaaggacaaaagaatagccgtgaacggatgaagcggatcgaggaaggcattaaagagctggggtctcaaatcttgaaggaacaccctgtggagaacactcagctccaaaatgaaaaactttacctgtactatttgcagaacggacgcgatatgtacgtggaccaagagttggatattaatcggctgagtgactacgacgttgatcatatcgtcccgcagagcttcctcaaagacgattctattgacaataaggtactgacgcgctctgataaaaaccgtggtaagtcggacaacgtgccctccgaagaggttgtgaaaaagatgaaaaattattggcgccagcttttaaacgcgaagctgatcacacaacgtaaattcgataatttgaccaaggctgaacggggtggcctgagcgagttagataaggcaggatttattaaacgccagttagtggagactcgtcaaatcaccaaacatgtcgcgcagattttggacagccggatgaacaccaagtacgatgaaaatgacaaactgatccgtgaggtgaaagtcattactctgaagtccaaattagttagtgatttccggaaggactttcaattctacaaagtccgtgaaattaataactatcatcacgcacatgacgcgtacctgaatgcagtggttgggaccgcccttatcaagaaatatcctaagctggagtcggagtttgtctatggcgactataaggtatacgatgttcgcaaaatgattgcgaaatctgagcaggagatcggtaaggcaaccgcaaaatatttcttttactcaaacattatgaatttctttaagacagaaatcactctggccaacggggagattcgcaaacgtccgttgatcgaaacaaacggcgagactggcgaaattgtttgggacaaagggcgtgatttcgcgacggtgcgcaaggtactgagcatgcctcaagtcaatattgttaagaaaaccgaagtgcagacgggcgggttttccaaggaaagcatcttacccaaacgtaattcagataaacttattgcacgcaaaaaggactgggatccgaaaaagtatggaggcttcgacagtccaaccgtagcctactctgttctcgttgtagcgaaagtagaaaagggtaaatccaagaaactgaaatctgtcaaggagttgcttggaatcaccattatggagcgtagctccttcgagaagaacccgattgactttctggaagccaaaggatataaagaggtcaagaaagatcttatcattaagctgcctaagtattcactcttcgagctggaaaatggtcgtaaacgcatgctcgcttctgccggcgagttgcagaagggcaatgaattagcacttccatcaaagtacgttaacttcctgtatttggccagccattacgagaaactgaaggggtctccagaggacaacgaacagaaacaattatttgtagagcagcacaagcattatcttgatgaaatcattgagcaaatttccgaattcagtaaacgcgtaatcctggccgatgcaaacctcgacaaggtgctgagcgcttacaataagcatcgcgacaaacctatccgtgagcaggctgaaaatatcattcacctgttcacattaacgaacctgggcgctccggccgcttttaaatatttcgacacgacaatcgaccgtaagcgctataccagtacgaaagaagtgttggatgcgacccttattcaccagtcaattacaggattatatgagacccgtatcgaccttagccaattaggtggggatgcggccagaagctctggcatcctgggcaagagaaagttcgagtga

SEQ ID NO: 317 - DNA, 4161 bp, synthetic construct
  source 1..4161: mol_type = other DNA
atggacaaaaagtactctattggcctggatatcgggaccaacagcgtcgggtgggctgttatcaccgacgagtataaagtaccttcgaaaaagttcaaagtgctgggcaacaccgatcgccattcaatcaaaaagaacttgattggtgcgctgttgtttgactccggggaaaccgccgaggcgactcgccttaaacgtacagcacgtcgccggtacactcggcgtaagaatcgcatttgctatttgcaggaaatctttagcaacgagatggcaaaagtcgatgactcgtttttccaccgcctcgaggaaagctttctggtggaggaagacaaaaagcatgagcgtcacccgatcttcggcaacattgtcgatgaagtagcgtatcatgaaaaatacccaaccatttaccacttacgcaaaaagctggtggacagcactgacaaagctgatttgcgccttatctatttagccctggcacatatgattaagtttcgtggtcacttcctgatcgaaggagacttaaatcccgacaacagtgatgttgataaattgtttattcagcttgtccaaacttacaatcaactgttcgaggaaaacccgatcaatgcctccggtgtggatgcaaaagccattttaagtgcacgccttagcaagtcccgtcgcttagaaaaccttatcgcgcagctgcccggcgagaaaaagaatggtttgtttgggaaccttattgccttgagcttaggcctcaccccgaatttcaaaagtaatttcgatcttgcagaagacgccaaattacaactgtcgaaggatacttatgatgacgatctcgataatctgttagcgcagattggtgaccaatacgccgatctttttctggcggctaaaaatctgagcgacgccatcttgctttcggatattctccgcgttaacaccgaaatcacgaaagcgcctcttagtgccagcatgattaaacgttatgatgaacaccaccaggacctgaccttactcaaagcgttggttcgccagcaactgccagagaagtacaaagaaatcttctttgatcagtcaaagaatggttatgccggctatattgacgggggtgcaagccaagaggaattctacaaatttatcaagcctattctggagaaaatggatggcaccgaagagttattggtgaagcttaaccgtgaagacctcctgcggaaacagcgcacattcgataatggttcgatcccacaccaaatccatttgggggagttacacgctattttgcgtcgccaggaagacttttaccctttcctgaaggataaccgggagaaaattgagaagatccttacctttcgtattccgtattacgtaggccccttagcacggggtaatagccgtttcgcgtggatgacacggaagtcggaagagacgatcaccccgtggaacttcgaagaggtagtcgacaagggcgcatcagcgcagtcttttattgaacgtatgacgaatttcgataaaaacttgcccaatgagaaggtgcttccgaaacattccttgttatatgaatattttacagtttacaacgagctgaccaaggttaaatacgtgacggaaggaatgcgcaagcccgcttttcttagcggtgagcaaaaaaaggcgatcgtcgacctgttattcaaaacgaatcgtaaggtgactgtaaagcaactcaaagaagattacttcaaaaagattgagtgcttcgacagcgtcgaaatctctggggtagaggatcggtttaacgcaagtttaggtacctaccatgacctgcttaaaatcattaaggataaagacttcttagataatgaagagaacgaagatattctcgaggacatcgtcttgacgttaaccttatttgaggatcgtgaaatgattgaggaacgcctcaaaacttatgcccacctgttcgacgataaggtgatgaagcagctgaaacgtcggcgctacacaggatggggccgcttgagtcgcaaacttattaacggaatccgtgacaagcaatccggcaaaacgattctggatttcttgaagtcggacggatttgctaatcgcaacttcatgcagttgatccatgatgactccctgacttttaaagaggatattcaaaaggcgcaggttagtggtcaaggcgacagcttacacgaacacatcgcaaatttggctggttcgccggccattaaaaaggggatcctccagaccgtgaaagttgtagatgagcttgttaaggtcatgggtcgtcataagcccgaaaacatcgtgattgaaatggcgcgggagaatcaaacgacccagaaaggacaaaagaatagccgtgaacggatgaagcggatcgaggaaggcattaaagagctggggtctcaaatcttgaaggaacaccctgtggagaacactcagctccaaaatgaaaaactttacctgtactatttgcagaacggacgcgatatgtacgtggaccaagagttggatattaatcggctgagtgactacgacgttgatcatatcgtcccgcagagcttcctcaaagacgattctattgacaataaggtactgacgcgctctgataaaaaccgtggtaagtcggacaacgtgccctccgaagaggttgtgaaaaagatgaaaaattattggcgccagcttttaaacgcgaagctgatcacacaacgtaaattcgataatttgaccaaggctgaacggggtggcctgagcgagttagataaggcaggatttattaaacgccagttagtggagactcgtcaaatcaccaaacatgtcgcgcagattttggacagccggatgaacaccaagtacgatgaaaatgacaaactgatccgtgaggtgaaagtcattactctgaagtccaaattagttagtgatttccggaaggactttcaattctacaaagtccgtgaaattaataactatcatcacgcacatgacgcgtacctgaatgcagtggttgggaccgcccttatcaagaaatatcctaagctggagtcggagtttgtctatggcgactataaggtatacgatgttcgcaaaatgattgcgaaatctgagcaggagatcggtaaggcaaccgcaaaatatttcttttactcaaacattatgaatttctttaagacagaaatcactctggccaacggggagattcgcaaacgtccgttgatcgaaacaaacggcgagactggcgaaattgtttgggacaaagggcgtgatttcgcgacggtgcgcaaggtactgagcatgcctcaagtcaatattgttaagaaaaccgaagtgcagacgggcgggttttccaaggaaagcatcttacccaaacgtaattcagataaacttattgcacgcaaaaaggactgggatccgaaaaagtatggaggcttcgacagtccaaccgtagcctactctgttctcgttgtagcgaaagtagaaaagggtaaatccaagaaactgaaatctgtcaaggagttgcttggaatcaccattatggagcgtagctccttcgagaagaacccgattgactttctggaagccaaaggatataaagaggtcaagaaagatcttatcattaagctgcctaagtattcactcttcgagctggaaaatggtcgtaaacgcatgctcgcttctgccggcgagttgcagaagggcaatgaattagcacttccatcaaagtacgttaacttcctgtatttggccagccattacgagaaactgaaggggtctccagaggacaacgaacagaaacaattatttgtagagcagcacaagcattatcttgatgaaatcattgagcaaatttccgaattcagtaaacgcgtaatcctggccgatgcaaacctcgacaaggtgctgagcgcttacaataagcatcgcgacaaacctatccgtgagcaggctgaaaatatcattcacctgttcacattaacgaacctgggcgctccggccgcttttaaatatttcgacacgacaatcgaccgtaagcgctataccagtacgaaagaagtgttggatgcgacccttattcaccagtcaattacaggattatatgagacccgtatcgaccttagccaattaggtggggatgcggccaaaagacctagcgccaccgtgcacctgtgtcctgtgcctagaaagagatga

SEQ ID NO: 318 - DNA, 4149 bp, synthetic construct
  source 1..4149: mol_type = other DNA
atggacaaaaagtactctattggcctggatatcgggaccaacagcgtcgggtgggctgttatcaccgacgagtataaagtaccttcgaaaaagttcaaagtgctgggcaacaccgatcgccattcaatcaaaaagaacttgattggtgcgctgttgtttgactccggggaaaccgccgaggcgactcgccttaaacgtacagcacgtcgccggtacactcggcgtaagaatcgcatttgctatttgcaggaaatctttagcaacgagatggcaaaagtcgatgactcgtttttccaccgcctcgaggaaagctttctggtggaggaagacaaaaagcatgagcgtcacccgatcttcggcaacattgtcgatgaagtagcgtatcatgaaaaatacccaaccatttaccacttacgcaaaaagctggtggacagcactgacaaagctgatttgcgccttatctatttagccctggcacatatgattaagtttcgtggtcacttcctgatcgaaggagacttaaatcccgacaacagtgatgttgataaattgtttattcagcttgtccaaacttacaatcaactgttcgaggaaaacccgatcaatgcctccggtgtggatgcaaaagccattttaagtgcacgccttagcaagtcccgtcgcttagaaaaccttatcgcgcagctgcccggcgagaaaaagaatggtttgtttgggaaccttattgccttgagcttaggcctcaccccgaatttcaaaagtaatttcgatcttgcagaagacgccaaattacaactgtcgaaggatacttatgatgacgatctcgataatctgttagcgcagattggtgaccaatacgccgatctttttctggcggctaaaaatctgagcgacgccatcttgctttcggatattctccgcgttaacaccgaaatcacgaaagcgcctcttagtgccagcatgattaaacgttatgatgaacaccaccaggacctgaccttactcaaagcgttggttcgccagcaactgccagagaagtacaaagaaatcttctttgatcagtcaaagaatggttatgccggctatattgacgggggtgcaagccaagaggaattctacaaatttatcaagcctattctggagaaaatggatggcaccgaagagttattggtgaagcttaaccgtgaagacctcctgcggaaacagcgcacattcgataatggttcgatcccacaccaaatccatttgggggagttacacgctattttgcgtcgccaggaagacttttaccctttcctgaaggataaccgggagaaaattgagaagatccttacctttcgtattccgtattacgtaggccccttagcacggggtaatagccgtttcgcgtggatgacacggaagtcggaagagacgatcaccccgtggaacttcgaagaggtagtcgacaagggcgcatcagcgcagtcttttattgaacgtatgacgaatttcgataaaaacttgcccaatgagaaggtgcttccgaaacattccttgttatatgaatattttacagtttacaacgagctgaccaaggttaaatacgtgacggaaggaatgcgcaagcccgcttttcttagcggtgagcaaaaaaaggcgatcgtcgacctgttattcaaaacgaatcgtaaggtgactgtaaagcaactcaaagaagattacttcaaaaagattgagtgcttcgacagcgtcgaaatctctggggtagaggatcggtttaacgcaagtttaggtacctaccatgacctgcttaaaatcattaaggataaagacttcttagataatgaagagaacgaagatattctcgaggacatcgtcttgacgttaaccttatttgaggatcgtgaaatgattgaggaacgcctcaaaacttatgcccacctgttcgacgataaggtgatgaagcagctgaaacgtcggcgctacacaggatggggccgcttgagtcgcaaacttattaacggaatccgtgacaagcaatccggcaaaacgattctggatttcttgaagtcggacggatttgctaatcgcaacttcatgcagttgatccatgatgactccctgacttttaaagaggatattcaaaaggcgcaggttagtggtcaaggcgacagcttacacgaacacatcgcaaatttggctggttcgccggccattaaaaaggggatcctccagaccgtgaaagttgtagatgagcttgttaaggtcatgggtcgtcataagcccgaaaacatcgtgattgaaatggcgcgggagaatcaaacgacccagaaaggacaaaagaatagccgtgaacggatgaagcggatcgaggaaggcattaaagagctggggtctcaaatcttgaaggaacaccctgtggagaacactcagctccaaaatgaaaaactttacctgtactatttgcagaacggacgcgatatgtacgtggaccaagagttggatattaatcggctgagtgactacgacgttgatcatatcgtcccgcagagcttcctcaaagacgattctattgacaataaggtactgacgcgctctgataaaaaccgtggtaagtcggacaacgtgccctccgaagaggttgtgaaaaagatgaaaaattattggcgccagcttttaaacgcgaagctgatcacacaacgtaaattcgataatttgaccaaggctgaacggggtggcctgagcgagttagataaggcaggatttattaaacgccagttagtggagactcgtcaaatcaccaaacatgtcgcgcagattttggacagccggatgaacaccaagtacgatgaaaatgacaaactgatccgtgaggtgaaagtcattactctgaagtccaaattagttagtgatttccggaaggactttcaattctacaaagtccgtgaaattaataactatcatcacgcacatgacgcgtacctgaatgcagtggttgggaccgcccttatcaagaaatatcctaagctggagtcggagtttgtctatggcgactataaggtatacgatgttcgcaaaatgattgcgaaatctgagcaggagatcggtaaggcaaccgcaaaatatttcttttactcaaacattatgaatttctttaagacagaaatcactctggccaacggggagattcgcaaacgtccgttgatcgaaacaaacggcgagactggcgaaattgtttgggacaaagggcgtgatttcgcgacggtgcgcaaggtactgagcatgcctcaagtcaatattgttaagaaaaccgaagtgcagacgggcgggttttccaaggaaagcatcttacccaaacgtaattcagataaacttattgcacgcaaaaaggactgggatccgaaaaagtatggaggcttcgacagtccaaccgtagcctactctgttctcgttgtagcgaaagtagaaaagggtaaatccaagaaactgaaatctgtcaaggagttgcttggaatcaccattatggagcgtagctccttcgagaagaacccgattgactttctggaagccaaaggatataaagaggtcaagaaagatcttatcattaagctgcctaagtattcactcttcgagctggaaaatggtcgtaaacgcatgctcgcttctgccggcgagttgcagaagggcaatgaattagcacttccatcaaagtacgttaacttcctgtatttggccagccattacgagaaactgaaggggtctccagaggacaacgaacagaaacaattatttgtagagcagcacaagcattatcttgatgaaatcattgagcaaatttccgaattcagtaaacgcgtaatcctggccgatgcaaacctcgacaaggtgctgagcgcttacaataagcatcgcgacaaacctatccgtgagcaggctgaaaatatcattcacctgttcacattaacgaacctgggcgctccggccgcttttaaatatttcgacacgacaatcgaccgtaagcgctataccagtacgaaagaagtgttggatgcgacccttattcaccagtcaattacaggattatatgagacccgtatcgaccttagccaattaggtggggatgcggccctgggcaagagatacgacagagactgggactacaagtga
